(19) United States
(12) Patent Application Publication
(10) Pub. No.: US 2009/0010966 A1
(43) Pub. Date: Jan. 8, 2009

(54) MODIFIED DIPHTHERIA TOXINS

(75) Inventors: Claude Geoffrey Davis, San Mateo, CA (US); Deepshikha Datta, San Francisco, CA (US)

Correspondence Address: WILSON SONSINI GOODRICH & ROSATI, 650 PAGE MILL ROAD, PALO ALTO, CA, 94304-1050, US

(73) Assignee: ANGELICA THERAPEUTICS, INC., Emeryville, CA (US)

(21) Appl. No.: 12/143,581

(22) Filed: Jun. 20, 2008

Related U.S. Application Data
(60) Provisional application No. 60/945,556, filed on Jun. 21, 2007.
(60) Provisional application No. 60/954,278, filed on Aug. 6, 2007.
(60) Provisional application No. 61/032,888, filed on Feb. 29, 2008.
(60) Provisional application No. 61/042,178, filed on Apr. 3, 2008.
(60) Provisional application No. 60/945,568, filed on Jun. 21, 2007.
(60) Provisional application No. 60/954,284, filed on Aug. 6, 2007.
(60) Provisional application No. 61/032,910, filed on Feb. 29, 2008.
(60) Provisional application No. 61/042,187, filed on Apr. 3, 2008.

(51) Int. Cl. A61K 39/05; C07K 14/195; A61P 35/04

(52) U.S. Cl. 424/238.1; 530/350

(57) ABSTRACT

The present application relates to compositions of modified diphtheria toxin and fusion proteins containing modified diphtheria toxin that reduce binding to vascular endothelium or vascular endothelial cells, and therefore, reduce the incidence of Vascular Leak Syndrome, as well as methods of making the compositions. The present application also relates to a polypeptide toxophore from a modified diphtheria toxin, where the modification is at least one amino acid residue at the amino acid residues 6-8, 28-30 or 289-291 of an unmodified native diphtheria toxin. Also described are fusion proteins which contain a modified diphtheria toxin and a non-diphtheria toxin fragment which contains a cell binding portion. The modified diphtheria toxins described can be used for the treatment of a malignant disease or a non-malignant disease.

### CROSS-REFERENCE

[0001] This application claims the benefit of U.S. Provisional Application No. 60/945,556, filed Jun. 21, 2007 (attorney docket number 33094-702.101), U.S. Provisional Application No. 60/954,278, filed Aug. 6, 2007 (attorney docket number 33094-702.102), U.S. Provisional Application No. 61/032,888, filed Feb. 29, 2008 (attorney docket number 33094-702.103), U.S. Provisional Application No. 61/042,178, filed Apr. 3, 2008 (attorney docket number 33094-702.104), U.S. Provisional Application No. 60/945,568, filed Jun. 21, 2007 (attorney docket number 33094-703.101), U.S. Provisional Application No. 60/954,284, filed Aug. 6, 2007 (attorney docket number 33094-703.102), U.S. Provisional Application No. 61/032,910, filed Feb. 29, 2008 (attorney docket number 33094-703.103), and U.S. Provisional Application No. 61/042,187, filed Apr. 3, 2008 (attorney docket number 33094-703.104), each of which applications is incorporated herein in its entirety by reference.

### BACKGROUND OF THE INVENTION

[0002] Vascular Leak Syndrome (VLS) arises from protein-mediated damage to the vascular endothelium. In the case of recombinant proteins, immunotoxins and fusion toxins, the damage is initiated by the interaction between therapeutic proteins and vascular endothelial cells.

[0003] The mechanisms underlying VLS are unclear and likely involve a cascade of events which are initiated in endothelial cells (ECs) and involve inflammatory cascades and cytokines (Engert et al., In: Clinical Applications of Immunotoxins, Frankel (ed.), 2:13-33, 1997. Freifelder, Physical Biochemistry, Second Edition, pages 238-246). VLS has a complex etiology involving damage to vascular endothelial cells (ECs) and extravasation of fluids and proteins resulting in interstitial edema, weight gain and, in its most severe form, kidney damage, aphasia, and pulmonary edema (Sausville and Vitetta, In: Monoclonal Antibody-Based Therapy of Cancer, Grossbard (ed.), 4:81-89, 1997; Baluna and Vitetta, “Vascular leak syndrome: A side effect of immunotherapy,” Immunopharmacology, 37:117-132, 1996; Engert et al., 1997 supra).

[0004] It was reported that one of the VLS motifs found in ricin toxin, the “LDV” motif, essentially mimics the activity of a subdomain of fibronectin which is required for binding to the integrin receptor. Integrins mediate cell-to-cell and cell-to-extracellular matrix interactions (ECM). Integrins function as receptors for a variety of cell surface and extracellular matrix proteins including fibronectin, laminin, vitronectin, collagen, osteospondin, thrombospondin and von Willebrand factor. Integrins play a significant role in the development and maintenance of vasculature and influence endothelial cell adhesiveness during angiogenesis. Further, it was reported that the ricin “LDV” motif can be found in a rotavirus coat protein, and this motif is important for cell binding and entry by the virus. (Coulson, et al., Proc. Natl. Acad. Sci. USA, 94(10): 5389-5494 (1997)). Thus, it appears to be a direct link between endothelial cell adhesion, vascular stability and the VLS motifs which mediate ricin binding to human vascular endothelial cells (HUVECs) and vascular leak.

[0005] Mutant deglycosylated ricin toxin A chains (dgRTAs) were constructed in which this motif was removed by conservative amino acid substitution, and these mutants illustrated fewer VLS effects in a mouse model (Smallshaw et al. Nat. Biotechnol., 21(4):387-91 (2003)). However, the majority of these constructs yielded dgRTA mutants that were not as cytotoxic as wild type ricin toxin, suggesting that significant and functionally critical structural changes in the ricin toxophore resulted from the mutations. It should also be noted that no evidence was provided to suggest that the motifs in dgRTA mediated HUVEC interactions and VLS in any other protein. Studies revealed that the majority of the mutant dgRTAs were much less effective toxophores and no evidence was provided to suggest that fusion toxins could be assembled using these variant toxophores.

[0006] VLS is often observed during bacterial sepsis and may involve IL-2 and a variety of other cytokines (Baluna and Vitetta, J. Immunother., (1999) 22(1):41-47). VLS is also observed in patients receiving protein fusion toxin or recombinant cytokine therapy. VLS can manifest as hypoalbuminemia, weight gain, pulmonary edema and hypotension. In some patients receiving immunotoxins and fusion toxins, myalgia and rhabdomyolysis result from VLS as a function of fluid accumulation in the muscle tissue or the cerebral microvasculature (Smallshaw et al., Nat. Biotechnol. 21(4):387-91 (2003)). VLS has occurred in patients treated with immunotoxins containing ricin A chain, saporin, pseudomonas exotoxin A and diphtheria toxin (DT). All of the clinical testing on the utility of targeted toxins, immunotoxins and recombinant cytokines reported that VLS and VLS-like effects were observed in the treatment population. VLS occurred in approximately 30% of patients treated with DAB₃₈₉IL-2 (Foss et al., Clin Lymphoma 1(4):298-302 (2001), Figgitt et al., Am J Clin Dermatol., 1(1):67-72 (2000)). DAB₃₈₉IL-2, is interchangeably referred to in this application as DT₃₈₇-IL2, is a protein fusion toxin comprised of the catalytic (C) and transmembrane (T) domains of DT (the DT toxophore), genetically fused to interleukin 2 (IL-2) as a targeting ligand. [Williams et al., Protein Eng., 1:493-498 (1987); Williams et al., J. Biol. Chem., 265:11885-11889 (1990); Williams et al., J. Biol. Chem., 265 (33):20673-20677, Waters et al., Ann. New York Acad. Sci., 30(636):403-405, (1991); Kiyokawa. et al., Protein Engineering, 4(4):463-468 (1991); Murphy et al., In Handbook of Experimental Pharmacology, 145:91-104 (2000)].

[0007] VLS has also been observed following the administration of IL-2, growth factors, monoclonal antibodies and traditional chemotherapy. Severe VLS can cause fluid and protein extravasation, edema, decreased tissue perfusion, cessation of therapy and organ failure. [Vitetta et al., Immunology Today, 14:252-259 (1993); Siegall et al., Proc. Natl. Acad. Sci., 91(20):9514-9518 (1994); Baluna et al., Int. J. Immunopharmacology, 18(6-7):355-361 (1996); Baluna et al., Immunopharmacology, 37(2-3):117-132 (1997); Bascon, Immunopharmacology, 39(3):255 (1998)].

[0008] Thus, there is a need to design modified diphtheria toxins that cause reduced vascular leak syndrome compared to wild-type diphtheria toxin.

### SUMMARY OF THE INVENTION

[0009] Provided herein are modified diphtheria toxins, fusion proteins containing the modified diphtheria toxins, compositions thereof, methods of making modified diphtheria toxins and methods of treating diseases such as malignant diseases or non-malignant diseases with modified diphtheria toxins.

[0010] Provided herein are compositions of modified diphtheria toxins, said modified diphtheria toxin comprising an amino acid sequence as recited in SEQ ID NO. 2 or 149 with one or more amino acid modifications therein, wherein at least one amino acid modification is made within an (x)D(y) motif in a region selected from among residues 7-9, 29-31 and 290-292 of SEQ ID NO 2 or 149, and said modified diphtheria toxin has cytotoxicity comparable to an unmodified diphtheria toxin. In one embodiment, a modification at position (x) is a substitution of V or I by an amino acid residue selected from among F, C, M, T, W, Y, P, H, E, Q, D, N, K, R, and a modified or unusual amino acid from Table 1. In another embodiment, a modification at position D is a substitution of D by an amino acid residue selected from among I, V, L, F, C, M, A, G, T, W, Y, P, H, Q, N, K, R and a modified or unusual amino acid from Table 1. In another embodiment, a modification at position (y) is a substitution of S by an amino acid residue selected from among I, F, C, M, A, G, T, W, Y, P, H, E, Q, D, N, K, R and a modified or unusual amino acid from Table 1. In one embodiment, a modified diphtheria toxin comprises two, three or more modifications in one or more (x)D(y) motifs.

[0011] Unmodified diphtheria toxins can have, for example, an amino acid sequence of SEQ ID NO: 2, 149 or an amino acid sequence of any one of SEQ ID NOS: 4-147.

[0012] In one embodiment, a modified diphtheria toxin contains one or more modifications selected from among V7T, V7N, V7D, D8N, S9A, S9T, S9G, V29N, V29D, V29T, D30N, S31 G, S31N, I290T, S292A, S292G and S292T.

[0013] In one embodiment, a modified diphtheria toxin contains two modifications. Such modified diphtheria toxins can contain a combination of mutations such as, for example, V7N V29N, V7N V29T, V7N V29D, V7T V29N, V7T V29T or V7T V29D.

[0014] In one embodiment, a modified diphtheria toxin contains three modifications. Such modified diphtheria toxins can contain a combination of mutations such as, for example, V7N V29N I290N, V7N V29N I290T, V7N V29N S292A, V7N V29N S292T, V7N V29T I290N, V7N V29T I290T, V7N V29T S292A, V7N V29T S292T, or V7T V29T I290T.

[0015] Compositions comprising modified diphtheria toxins exhibit (have) reduced binding activity to human vascular endothelial cells (HUVECs) compared to an unmodified diphtheria toxin. Such compositions can further comprise a non-diphtheria toxin polypeptide including, but not limited to, an antibody or an antigen-binding fragment thereof, EGF, IL-1, IL-2, IL-3, IL-4, IL-5, IL-6, IL-7, IL-8, IL-9, IL-10, IL-11, IL-12, IL-13, IL-14, IL-15, INFα, INFγ, GM-CSF, G-CSF, M-CSF, TNF, VEGF, Ephrin, BFGF and TGF. The non-diphtheria toxin polypeptide can also be a fragment of such polypeptides, such as a cell-binding portion thereof. In one embodiment, the modified toxin is fusion toxin wherein the cell binding domain is an antibody or antigen-binding fragment thereof. An antibody can be, for example, monoclonal, polyclonal, humanized, genetically engineered, or grafted. An antigen-binding fragment can be, for example, a Fab, Fab₂, F(ab′)₂, scFv, scFv2, single chain binding polypeptide, V_{H}, or V_{L}. In a further embodiment, the antibody or antigen binding fragment thereof binds to a B-cell surface molecule such as, for example, the B-cell surface molecule CD19 or CD22. Alternatively, the antibody or antigen binding fragment thereof, binds to the ovarian receptor MISIIR (Mullerian Inhibitory Substance type II receptor). In one embodiment, the non-diphtheria toxin polypeptide is IL-2 or a cell-binding portion thereof, or IL-3 or a cell-binding portion thereof.

[0016] Provided herein are fusion proteins of a polypeptide toxophore from a modified diphtheria toxin, and a non-diphtheria toxin polypeptide, said polypeptide toxophore comprising a diphtheria toxin having an amino acid sequence as recited in SEQ ID NO. 2 with one or more amino acid modifications therein, wherein at least one amino acid modification is made within an (x)D(y) motif in a region selected from among residues 7-9, 29-31 and 290-292 of SEQ ID NO 2 or 149, and said modified diphtheria toxin has cytotoxicity comparable to an unmodified diphtheria toxin. In one embodiment, a modification at position (x) is a substitution of V or I by an amino acid residue selected from among F, C, M, T, W, Y, P, H, E, Q, D, N, K, R, and a modified or unusual amino acid from Table 1. In one embodiment, a modification at position D is a substitution of D by an amino acid residue selected from among I, V, L, F, C, M, A, G, T, W, Y, P, H, Q, N, K, R and a modified or unusual amino acid from Table 1. In one embodiment, a modification at position (y) is a substitution of S by an amino acid residue selected from among I, F, C, M, A, G, T, W, Y, P, H, E, Q, D, N, K, R and a modified or unusual amino acid from Table 1. In one embodiment, a modified diphtheria toxin comprises two, three or more modifications in one or more (x)D(y) motifs.

[0017] The fusion proteins have reduced binding to human vascular endothelial cells compared to, for example, a diphtheria toxin molecule having a sequence of SEQ ID NO: 1, 2 or 200.

[0018] In one embodiment, a modified diphtheria toxin contains one or more modifications selected from among V7T, V7N, V7D, D8N, S9A, S9T, S9G, V29N, V29D, V29T, D30N, S31G, S31N, I290T, S292A, S292G and S292T.

[0019] In one embodiment, a modified diphtheria toxin contains two modifications. Such modified diphtheria toxins can contain a combination of mutations such as, for example, V7N V29N, V7N V29T, V7N V29D, V7T V29N, V7T V29T or V7T V29D.

[0020] In one embodiment, a modified diphtheria toxin contains three modifications. Such modified diphtheria toxins can contain a combination of mutations such as, for example, V7N V29N I290N, V7N V29N I290T, V7N V29N S292A, V7N V29N S292T, V7N V29T I290N, V7N V29T I290T, V7N V29T S292A, V7N V29T S292T, or V7T V29T I290T.

[0021] The non-diphtheria toxin polypeptide can be, for example, an antibody or an antigen-binding fragment thereof, EGF, IL-1, IL-2, IL-3, IL-4, IL-5, IL-6, IL-7, IL-8, IL-9, IL-10, IL-11, IL-12, IL-13, IL-14, IL-15, INFα, INFγ, GM-CSF, G-CSF, M-CSF, TNF, VEGF, Ephrin, BFGF, TGF, and a cell-binding portion thereof. In one embodiment, the non-diphtheria toxin polypeptide is IL-2 or a cell-binding portion thereof.

[0022] Provided herein are pharmaceutical compositions comprising a fusion protein and a pharmaceutically acceptable carrier or excipient.

[0023] Provided herein is a method for treating malignant diseases and non-malignant diseases such as GVHD in a mammal comprising administering a therapeutically effective amount of a pharmaceutical composition described herein to said mammal.

[0024] Malignant diseases can be a blood cancer. Malignant diseases can be a solid tumor. Malignant diseases also can be a metastasis. Exemplary blood cancers include, but are not limited to, acute myelogenous leukemia, cutaneous T-cell lymphoma, relapsed/refractory T-cell non-Hodgkin lymphoma, relapsed/refractory B-cell non-Hodgkin lymphoma, panniculitic T-cell lymphoma, extranodal natural killer/T cell lymphoma, nasal type, chronic lymphocytic leukemia, solid tumor and human T-cell lymphotrophic virus 1-associated acute T cell leukemia/lymphoma. Exemplary solid tumors include, but are not limited to, those of a tissue or organ selected from among skin, melanoma, lung, pancreas, breast, ovary, colon, rectum, stomach, thyroid, laryngeal, prostate, colorectal, head, neck, eye, mouth, throat, esophagus, chest, bone, testicular, lymph, marrow, bone, sarcoma, renal, sweat gland, liver, kidney, brain, gastrointestinal tract, nasopharynx, genito-urinary tract, muscle, and the like tissues. Metastasis include, but are not limited to, metastatic tumors of any of the solid tumors described.

[0025] Non-malignant diseases include, for example, GVHD, aGVHD and psoriasis.

[0026] Provided herein is a method of enhancing activity of an anti-cancer agent (e.g., RNA transfected DCs, anti-CLTA4 antibodies, MISIIR scFvs, etc.), by administering a DT variant-IL2 fusion protein described herein. In one embodiment, a DT variant-IL2 fusion protein is administered followed by administration of the anti-cancer agent. In one non-limiting example, the DT variant-IL2 fusion protein is administered at least four (4) days prior to the anti-cancer agent.

[0027] Also provided herein is a method of treating a metastatic cancer via reduction or elimination of Tregs by administering an anti-cancer agent (e.g., RNA transfected DCs, anti-CLTA4 antibodies, MISIIR scFvs, etc.) and a DT variant-IL2 fusion protein described herein. Metastatic tumors include, for example, metastatic renal cell carcinoma, metastatic prostate cancer, metastatic ovarian cancer and metastatic lung cancer. In one embodiment, a DT variant-IL2 fusion protein is administered followed by administration of the anti-cancer agent. In one non-limiting example, the DT variant-IL2 fusion protein is administered at least four (4) days prior to the anti-cancer agent.

[0028] In another aspect, provided herein is a method of treating a prostate tumor, an ovarian tumor, a lung tumor or a melanoma via reduction or elimination of Tregs by administering an anti-cancer agent (e.g., RNA transfected DCs, anti-CLTA4 antibodies, MISIIR scFvs, etc.) and a DT variant-IL2 fusion protein described herein. In one embodiment, a DT variant-IL2 fusion protein is administered followed by administration of the anti-cancer agent. In one non-limiting example, the DT variant-IL2 fusion protein is administered at least four (4) days prior to the anti-cancer agent.

[0029] Provided herein is a method for making a composition comprising the steps of: (a) constructing a vector comprising a nucleic acid sequence which encodes a polypeptide having an amino acid sequence of any of SEQ ID NOS: 4-147 or a polypeptide having two or more modifications of SEQ ID NOS: 4-147, and (b) causing said polypeptide to be expressed in a host cell comprising said vector. In one embodiment, a composition produced by such a method, wherein said composition has a reduced binding activity to human vascular endothelial cells (HUVEC) compared to a DT molecule having a sequence of SEQ ID NO: 2 or 149.

[0030] Provided herein is a method for making a modified diphtheria toxin having a reduced binding activity to human vascular endothelial cells (HUVEC) compared to an unmodified diphtheria toxin, said method comprising the step of: (a) constructing a vector comprising a nucleic acid sequence encoding a modified diphtheria toxin, said modified diphtheria toxin comprising a diphtheria toxin having an amino acid sequence as recited in SEQ ID NO: 2 or 149 with one or more amino acid modifications therein, wherein at least one amino acid modification is made within an (x)D(y) motif in a region selected from the group consisting of residues 7-9, 29-31 and 290-292 of SEQ ID NO: 2 or 149, and said modified diphtheria toxin has cytotoxicity comparable to an unmodified diphtheria toxin, wherein a modification at position (x) is a substitution of V or I by an amino acid residue selected from among F, C, M, T, W, Y, P, H, E, Q, D, N, K, R, and a modified or unusual amino acid from Table 1; or wherein a modification at position D is a substitution of D by an amino acid residue selected from among I, V, L, F, C, M, A, G, T, W, Y, P, H, Q, N, K, R and a modified or unusual amino acid from Table 1; or wherein a modification at position (y) is a substitution of S by an amino acid residue selected from among I, F, C, M, A, G, T, W, Y, P, H, E, Q, D, N, K, R and a modified or unusual amino acid from Table 1; or a combination of two, three or more modifications in one or more (x)D(y) motifs, and wherein said modified diphtheria toxin has cytotoxicity comparable to that of a diphtheria toxin having a sequence of SEQ ID NO: 2 or 149; and (b) causing said polypeptide to be expressed in a host cell comprising said vector.

[0031] Unmodified diphtheria toxins can have, for example, an amino acid sequence of SEQ ID NO: 2, 149 or an amino acid sequence of any one of SEQ ID NOS: 4-147.

[0032] In one embodiment, a modified diphtheria toxin contains one or more modifications selected from among V7T, V7N, V7D, D8N, S9A, S9T, S9G, V29N, V29D, V29T, D30N, S31 G, S31N, I290T, S292A, S292G and S292T.

[0033] In one embodiment, a modified diphtheria toxin contains two modifications. Such modified diphtheria toxins can contain a combination of mutations such as, for example, V7N V29N, V7N V29T, V7N V29D, V7T V29N, V7T V29T or V7T V29D.

[0034] In one embodiment, a modified diphtheria toxin contains three modifications. Such modified diphtheria toxins can contain a combination of mutations such as, for example, V7N V29N I290N, V7N V29N I290T, V7N V29N S292A, V7N V29N S292T, V7N V29T I290N, V7N V29T I290T, V7N V29T S292A, V7N V29T S292T, or V7T V29T I290T.

[0035] Provided herein is a fusion protein comprising a modified diphtheria toxin made by such a method and a non-diphtheria toxin polypeptide, wherein said non-diphtheria toxin polypeptide is selected from among an antibody or antigen-binding fragment thereof, EGF, IL-1, IL-2, IL-3, IL-4, IL-5, IL-6, IL-7, IL-8, IL-9, IL-10, IL-11, IL-12, IL-13, IL-14, IL-15, INFα, INFγ, GM-CSF, G-CSF, M-CSF, TNF, VEGF, Ephrin, BFGF, TGF, and a cell-specific binding portion thereof. In one embodiment, the non-diphtheria toxin polypeptide is, for example, IL-2 or a cell-specific binding portion thereof, or IL-3 or a cell-specific binding portion thereof.

### INCORPORATION BY REFERENCE

[0036] All publications and patent applications mentioned in this specification are herein incorporated by reference to the same extent as if each individual publication or patent application was specifically and individually indicated to be incorporated by reference.

### BRIEF DESCRIPTION OF THE DRAWINGS

[0037] FIG. 1. Wild-type ΔR DT (diamonds) inhibited transcription/translation of T7-luc plasmid to a greater extent than the null construct (asterisk) in an IVTT assay.

[0038] FIG. 2. DT specific antibodies detected DT bound to the surface of endothelial cells. Binding of a DT variant (DT-Glu52; CRM mutant) to HUVEC cells and detection by antibodies using FACS analysis. Black bars are results using no binding agents. Diagonal hatching indicates assay controls using various conditions as described. Cross-hatching indicates DT variant in the presence of detection antibodies (DT+Goat pAb anti-DT (Serotec)+anti-gt-PE).

[0039] FIG. 3. Binding of ONTAK-A1488 and DT-Glu52-A1488 to HUVEC cells—detection by antibody by FACS. ONTAK®-A1488 6:1 D:P (yellow top line; diamonds); DT-Glu52-A1488 3:1 D:P (red middle line; circles); and DT-Glu52-A1488 2:1 D:P (green bottom line; triangles).

[0040] FIG. 4. HUVEC cells were tested for IL-2R expression by FACS: it was confirmed that ONTAK®-A1488 is not binding via IL-2 receptors.

[0041] FIG. 5. Illustrates cell membrane integrity assays using propidium iodide and FACS to measure loss of integrity of cell membrane after short incubation with toxins. ONTAK® (diamonds), DT-Glu52 (squares) and rhIL-2 (triangles). ONTAK (containing 4 VLS motifs) appears to cause more membrane damage than either DT-Glu52 (3 VLS motifs) or rhIL-2 (1 VLS motif).

[0042] FIG. 6. Cytotoxicity assays are utilized to confirm activity of DT-IL2 T cell epitope and VLS variant leads selected in IVTT assays. ONTAK® (diamonds), recombinant human IL-2 (rhIL-2; squares) and control (triangles) illustrate that ONTAK® is cytotoxic.

[0043] FIG. 7. Illustrates ADP Ribosylation activity of variants relative to wild-type (WT). Threshold for the assay was 0.5. Bars marked with “!” or “*” indicate statistically significant results.

[0044] FIG. 8. Inhibition of in vitro transcription/translation of target T7-luciferase plasmid, by wild-type and epitope (EP) variants of DT, was measured using the T7-coupled reticulocyte lysate kit and SteadyGlo chemiluminescence reagents (Promega). IC₅₀s were determined and value for wild-type DT was divided by the value for each epitope variant to calculate the activity ratio plotted (Y axis). Mean values from replicate experiments (n=3) are shown. 1=WT activity. 0.5=threshold of minimum acceptable activity.

[0045] FIG. 9. Shows the relative activities of VLS DT variants compared to wild type DT in the inhibition of protein synthesis.

[0046] FIG. 10. Shows binding of labeled VLS variants to HUVEC cells. DT389-IL2 is shown as closed diamonds (♦), DT382 is shown as closed squares (▪), DT382(V7N V29T S292T) is shown as closed triangles (▴), DT382(V7N V29T I290N) is shown as an “x,” and BSA is shown as a closed circle ().

[0047] FIG. 11. Binding of ONTAK-488, control DT(ΔR)488 and BSA-488 to HUVEC cells—detection by antibody by FACS. ONTAK®488 2.8:1 D:P (top line; plus sign “+”); control DT(ΔR)-488 3:1 D:P (second top line; circles “”); BSA-488 7:1 D:P (middle line; asterisks “*”), BSA-488 5:1 D:P (second bottom line; “x”) and BSA-488 2.6:1 D:P (bottom line; triangles “▴”).

[0048] FIG. 12. Provides amino acid sequences of wild type DT382, DT382 variants, and null construct DT382(G53E). Underlined sequences are vector/tag sequences; enterokinase cleavage site highlighted in italicized text; and mutations from WT sequences are shown in bold text.

### DETAILED DESCRIPTION OF THE INVENTION

[0049] It is to be understood that this application is not limited to particular formulations or process parameters, as these may, of course, vary. It is also to be understood that the terminology used herein is for the purpose of describing particular embodiments only, and is not intended to be limiting. Further, it is understood that a number of methods and materials similar or equivalent to those described herein can be used in the practice of the present invention(s).

[0050] In accordance with the present application, there may be employed conventional molecular biology, microbiology, and recombinant DNA techniques within the skill of the art. Such techniques are explained fully in the literature. See, e.g., Sambrook et al, “Molecular Cloning: A Laboratory Manual” (1989); “Current Protocols in Molecular Biology” Volumes I-III [Ausubel, R. M., ed. (1994)]; “Cell Biology: A Laboratory Handbook” Volumes I-III [J. E. Celis, ed. (1994))]; “Current Protocols in Immunology” Volumes I-III [Coligan, J. E., ed. (1994)]; “Oligonucleotide Synthesis” (M. J. Gait ed. 1984); “Nucleic Acid Hybridization” [B. D. Hames & S. J. Higgins eds. (1985)]; “Transcription And Translation” [B. D. Hames & S. J. Higgins, eds. (1984)]; “Animal Cell Culture” [R. I. Freshney, ed. (1986)]; “Immobilized Cells And Enzymes” [IRL Press, (1986)]; B. Perbal, “A Practical Guide To Molecular Cloning” (1984), each of which is specifically incorporated herein by reference in its entirety.

### I. Overview

[0051] Cell damage, particularly endothelial cell damage, whether produced by toxins, such as from snake bites or molecules causing septic shock, or therapeutic agents, such as immunotoxins or interleukins, remains a problem for patients.

[0052] VLS is often observed during bacterial sepsis and may involve IL-2 and a variety of other cytokines (Baluna and Vitetta, Immunopharmacology, 37:117-132, 1996). The mechanisms underlying VLS are unclear and are likely to involve a cascade of events which are initiated in endothelial cells (ECs) and involve inflammatory cascades and cytokines (Engert et al., In: Clinical Applications of Immunotoxins, Frankel (ed.), 2:13-33, 1997). VLS has a complex etiology involving damage to vascular endothelial cells (ECs) and extravasation of fluids and proteins resulting in interstitial edema, weight gain and, in its most severe form, kidney damage, aphasia, and pulmonary edema (Sausville and Vitetta, In: Monoclonal Antibody-Based Therapy of Cancer, Grossbard (ed.), 4:81-89, 1997; Baluna and Vitetta, Immunopharmacology, 37:117-132, 1996; Engert et al., In: Clinical Applications of Immunotoxins, Frankel (ed.), 2:13-33, 1997). Vascular leak syndrome (VLS) has been a major problem with all immunotoxins thus far tested in humans, as well as cytokines such as interleukin 2 (IL-2), TNF and adenovirus vectors (Rosenberg et al., N. Engl. J. Med., 316:889-897, 1987; Rosenstein et al., J. Immunol., 137:1735-1742, 1986).

[0053] Antibody-conjugated peptides from ricin toxin A chain containing a modified sequence at residues L74, D75, V76, exhibited reduced (Vitetta et al. U.S. Pat. No. 6,566,500). Thus, it is contemplated that one or more amino acid deletion(s) or mutation(s) of the (x)D(y) sequence(s), and/or one or more flanking residues of diphtheria toxin, may reduce or prevent the ability of DT molecules comprising these sequences to induce EC damage. It is expected that one or more polypeptides comprising at least one mutated motif and/or one or more flanking residues can be created that reduce or eliminate the EC damaging activity of such agents.

[0054] Described herein below are compositions with reduced VLS promoting abilities based upon mutations in the (x)D(y) or (x)D(y)T sequences within polypeptides, which remove or alter such sequences, respectively, and their methods of use. Thus, it will be understood that all methods described herein for producing polypeptides with reduced VLS promoting ability will be applied to produce polypeptides with reduced EC damaging activity. All such methods, and compositions identified or produced by such methods as well as equivalents thereof, are encompassed by the present invention.

[0055] In certain aspects, the application provides the use of a modified diphtheria toxin composition that has at least one amino acid of a sequence comprising (x)D(y) and/or (x)D(y)T removed or altered, relative to the sequence of an unmodified diphtheria toxin composition, for the manufacture of a medicament for the treatment of a disease, including but not limited to malignant diseases such as, for example acute myelogenous leukemia, cutaneous T-cell lymphoma, relapsed/refractory T-cell non-Hodgkin lymphoma, relapsed/refractory B-cell non-Hodgkin lymphoma, panniculitic T-cell lymphoma, extranodal natural killer/T cell lymphoma, nasal type, chronic lymphocytic leukemia, and human T-cell lymphotrophic virus 1-associated acute T cell leukemia/lymphoma; non-malignant diseases such as, for example, graft versus host disease and damage to endothelial cells (i.e., VLS) during the progression of such diseases.

[0056] Clearly, further development of diphtheria toxin as well, as well as cytokines and fusion proteins thereof as clinical agents would be greatly facilitated by the elimination or reduction of VLS. If VLS could be avoided or reduced it would permit the use of much higher doses of a variety of therapeutic agents without the dose limiting side effects currently encountered.

[0057] Reduction or elimination of VLS as a side effect would represent a significant advancement as it would improve the “risk benefit ratio” of protein therapeutics, and in particular, the immunotoxin and fusion toxin subclasses of protein therapeutics. (Baluna et al., Int. J. Immunopharmacology, 18(6-7):355-361 (1996); Baluna et al., Immunopharmacology, 37(No. 2-3):117-132 (1997); Bascon, Immunopharmacology, 39(3): 255 (1998). The ability to develop fusion proteins, single chain molecules comprised of a cytotoxin and unique targeting domain (cell binding domains in the case of immunotoxins) could facilitate the development of the therapeutic agents for autoimmune diseases, such as rheumatoid arthritis and psoriasis transplant rejection and other non-malignant medical indications. (Chaudhary et al., Proc. Natl. Acad. Sci. USA, 87(23):9491-9494 (1990); Frankel et al., In Clinical Applications of Immunotoxins Scientific Publishing Services, Charleston S.C., (1997), Knechtle et al., Transplantation, 15(63):1-6 (1997); Knechtle et al., Surgery, 124(2): 438-446 (1998); LeMaistre, Clin. Lymphoma, 1:S3740 (2000); Martin et al., J. Am. Acad. Dermatol., 45(6):871-881, 2001)). DAB₃₈₉IL-2 (ONTAK®) is currently the only FDA approved protein fusion toxin and employs a DT toxophore and the cytokine IL-2 to target IL-2 receptor bearing cells and is approved for the treatment of cutaneous T-cell lymphoma (CTCL) (Figgitt et al., Am. J. Clin. Dermatol., 1(1):67-72 (2000); Foss, Clin. Lymphoma, 1(4):298-302 (2001); Murphy et al., In Bacterial Toxins: Methods and Protocols, Holst O, ed, Humana Press, Totowa, N.J., pp. 89-100 (2000)). ONTAK® is variously referred to as denileukin diftitox, DAB₃₈₉-IL-2, or Onzar. Its structure is comprised of, in order, a methionine residue, residues 1-386 of native DT, residues 484-485 of native DT, and residues 2-133 of IL-2 (SEQ ID NO: 148). Hence, full length ONTAK® contains 521 amino acids. It should be noted that, as a result of the methionine residue added at the N terminus of ONTAK®, numbering in the sequence of diphtheria is out of register with that of ONTAK® by one.

[0058] A number of other toxophores, most notably ricin toxin and pseudomonas exotoxin A, have been employed in developing both immuntoxins, fusion toxins and chemical conjugates; however, these molecules have not successfully completed clinical trials and all exhibit VLS as a pronounced side effect (Kreitman, Adv. Pharmacol., 28:193-219 (1994); Puri et al., Cancer Research, 61:5660-5662 (1996); Pastan, Biochim Biophys Acta., 24:1333(2):C₁₋₆ (1997); Frankel et al., Supra (1997); Kreitman et al., Current Opin. Invest. Drugs, 2(9): 1282-1293 (2001)). The modifications described herein for diphtheria toxin can be extrapolated to other toxins such as, for example, ricin and pseudomonas exotoxin A.

### II. Diphtheria Toxin

[0059] Diphtheria toxin (DT) is composed of three domains: a catalytic domain; a transmembrane domain; and a receptor binding domain (Choe et al. Nature, 357:216-222 (1992)). The nucleic acid and amino acid sequences of native DT were described by Greenfield et al. PNAS (1983) 80: 6853-6857 in FIG. 2. Native DT is targeted to cells that express heparin binding epidermal growth factor-like receptors (Naglish et al., Cell, 69:1051-1061 (1992)). The first generation targeted toxins were initially developed by chemically cross-linking novel targeting ligands to toxins such as DT or mutants of DT deficient in cell binding (e.g. CRM45). (Cawley, Cell 22:563-570 (1980); Bacha et al., Proc. Soc. Exp. Biol. Med., 181(1):131-138 (1986); Bacha et al., Endocrinology, 113(3):1072-1076 (1983); Bacha et al., J. Biol. Chem, 258(3):1565-1570 (1983)). The native cell binding domain or a cross-linked ligand that directs the DT toxophore to receptors on a specific class of receptor-bearing cells must possess intact catalytic and translocation domains. (Cawley et al., Cell, 22:563-570 (1980); vanderSpek et al., J. Biol. Chem., 5:268(16):12077-12082 (1993); vanderSpek et al., J. Biol. Chem., 7(8):985-989 (1994); vanderSpek et al., J. Biol. Chem., 7(8)985-989 (1994); Rosconi, J. Biol. Chem., 10; 277(19):16517-161278 (2002)). These domains are critical for delivery and intoxification of the targeted cell following receptor internalization (Greenfield et al., Science, 238(4826)536-539 (1987)). Once the toxin, toxin conjugate or fusion toxin has bound to the cell surface receptor, the cell internalizes the toxin bound receptor via endocytic vesicles. As the vesicles are processed, they become acidified, and the translocation domain of the DT toxophore undergoes a structural reorganization which inserts the 9 transmembrane segments of the toxin into the membrane of the endocytic vesicle. This event triggers the formation of a productive pore through which the catalytic domain of the toxin is threaded. Once translocated, the catalytic domain which possess the ADP-ribosyltransferase activity, is released into the cytosol of the targeted cell, it is free to poison translation thus effecting the death of the cell (reviewed in vanderSpek et al., Methods in Molecular Biology, Bacterial Toxins: methods and Protocols, 145:89-99, Humana press, Totowa, N.J., (2000)).

[0060] A. Modified Diphtheria Toxins

[0061] Fewer than ten molecules of DT will kill a cell if they enter the cytosol (although many times that number must bind to the cell surface because the entry process is inefficient). This extraordinary potency initially led to the concern that such poisons were too powerful to control. However, toxins such as DT can be rendered innocuous (except when directed to the target cells) simply by removing or modifying their cell-binding domain or subunit. The remaining portion of the toxin (lacking a cell-binding domain) can then be coupled to a ligand (e.g., a polypeptide or portion thereof containing a cell-binding domain) that targets the toxic portion to a target cell. By selecting a polypeptide or portion thereof containing a cell-binding domain lacking unwanted cross-reactivity, fusion proteins are safer and have fewer non-specific cytotoxic effects than most conventional anti-cancer drugs. The other main attraction of toxins such as DT is that because they are inhibitors of protein synthesis, they kill resting cells as efficiently as dividing cells. Hence, tumor or infected cells that are not in cycle at the time of treatment do not escape the cytotoxic effect of a fusion protein.

[0062] Toxins such as DT often contain two disulfide-bonded chains, the A and B chains. The B chain carries both a cell-binding region and a translocation region, which facilitates the insertion of the A chain through the membrane of an acid intracellular compartment into the cytosol. The A chain then kills the cell after incorporation. For their use in vivo, the ligand and toxin are coupled in such a way as to remain stable while passing through the bloodstream and the tissues and yet be labile within the target cell so that the toxic portion can be released into the cytosol.

[0063] However, it may be desirable from a pharmacologic standpoint to employ the smallest molecule possible that nevertheless provides an appropriate biological response. One may thus desire to employ smaller A chain peptides or other toxins which will provide an adequate anti-cellular response.

[0064] In certain embodiments, diphtheria toxins or compounds modified based on one or more of the (x)D(y) and/or (x)D(y)T motifs or its flanking sequences can be used to inhibit VLS in vivo. Thus, it is contemplated that such mutations that affects the (x)D(y) sequence or flanking sequence can alter the ability of a polypeptide to induce VLS or other abilities associated with these sequences. In one non-limiting example, diphtheria toxin is modified to inhibit VLS in vivo.

[0065] In order to produce diphtheria toxins or compounds that have a reduced ability to induce VLS, it is contemplated that one or more (up to, and including all) remaining (x)D(y) and/or (x)D(y)T sequences have a reduced exposure to the surface of the polypeptide. For example, it is contemplated that (x)D(y) and/or (x)D(y)T sequences that are at least partly located in the non-exposed portions of a polypeptide, or otherwise masked from full or partial exposure to the surface of the molecule, would interact less with cells, receptors or other molecules to promote or induce VLS. Thus, the complete elimination of (x)D(y) and/or (x)D(y)T sequences from the primary structure of the polypeptide may not be necessary to produce toxins or molecules with a reduced ability to induce or promote VLS. However, removal of all (x)D(y) and/or (x)D(y)T sequences is contemplated to produce a composition that has the least ability to induce or promote VLS.

[0066] To determine whether a mutation would likely produce a polypeptide with a less exposed (x)D(y) and/or (x)D(y)T motif, the putative location of the moved or added (x)D(y) and/or (x)D(y)T sequence can be determined by comparison of the mutated sequence to that of the unmutated polypeptide's secondary and tertiary structure, as determined by such methods known to those of ordinary skill in the art including, but not limited to, X-ray crystallography, NMR or computer modeling. Computer models of various polypeptide structures are also available in the literature or computer databases. In a non-limiting example, the Entrez database website (ncbi.nln.nih.gov/Entrez/) can be used to identify target sequences and regions for mutagenesis. The Entrez database is cross-linked to a database of 3-D structures for the identified amino acid sequence, if known. Such molecular models can be used to identify (x)D(y), (x)D(y)T and/or flanking sequences in polypeptides that are more exposed to contact with external molecules, than similar sequences embedded in the interior of the polypeptide. (x)D(y), (x)D(y)T and/or flanking sequences that are more exposed to contact with external molecules are more likely to contribute to promoting or reducing VLS and other toxic effects associated with these sequences and, thus, should be primary targets for mutagenesis. The mutated or wild-type polypeptide's structure could be determined by X-ray crystallography or NMR directly before use in in vitro or in vivo assays, as would be known to one of ordinary skill in the art.

[0067] Once an amino acid sequence comprising a (x)D(y) and/or (x)D(y)T sequence is altered in a polypeptide, changes in its ability to induce or promote at least one toxic effect can be assayed using any of the techniques described herein or as known to one of ordinary skill in the art.

[0068] As used herein, “alter,” “altered,” “altering,” and “alteration” of an amino acid sequence comprising a (x)D(y) sequence or a (x)D(y)T sequence can include chemical modification of an amino acid sequence comprising a (x)D(y) and/or a (x)D(y)T sequence in a polypeptide as known to those of ordinary skill in the art, as well as any mutation of such an amino acid sequence including, but not limited to, insertions, deletions, truncations or substitutions. Such changes can alter or modify (reduce) at least one toxic effect (i.e., the ability to promote VLS, EC damage, etc.) of one or more amino acid sequence(s) comprising a (x)D(y) and/or (x)D(y)T sequences. As used herein an amino acid sequence comprising a (x)D(y) sequence or a (x)D(y)T sequence can contain at least one flanking sequence C- and/or N-terminal to a (x)D(y) and/or a (x)D(y)T tri- or quatra-peptide sequence. Such an “alteration” can be made in synthesized polypeptides or in nucleic acid sequences that are expressed to produce mutated polypeptides.

[0069] In one aspect, the alteration of an amino acid sequence containing a (x)D(y) and/or a (x)D(y)T sequence is by removal of the amino acid sequence. As used herein, “remove”, “removed”, “removing” or “removal” of an amino acid sequence containing a (x)D(y) and/or a (x)D(y)T sequence refers to a mutation in the primary amino acid sequence that eliminates the presence of the (x)D(y) and/or a (x)D(y)T tri- or quatra-peptide sequence, and/or at least one native flanking sequence. The terms “removed” or “lacks” are used interchangeably.

[0070] One aspect of the present application relates to genetically modified polypeptides of diphtheria toxin (DT) having reduced binding to human vascular endothelial cells (HUVECs). These modified polypeptides are hereinafter referred to as modified DTs, modified DT polypeptides or DT variants. The present application provides for modified DT having one or more changes within the (x)D(y) motifs of the DT polypeptide, i.e., at residues 6-8 (VDS), residues 28-30 (VDS), and residues 289-291 (IDS) of the native DT sequence (SEQ ID NO: 1), or at residues 7-9 (VDS), residues 29-31 (VDS), and residues 290-292 (IDS) of SEQ ID NO: 2 or 149. Since the (x)D(y) motifs are referred to as “VLS motifs,” the modified DT polypeptides with one or more modified (x)D(y) motifs can be referred to as “VLS-modified DT polypeptides.”

[0071] With the identification of the (x)D(y) and the (x)D(y)T motifs as inducing VLS, inducing apoptosis, and other effects, it is possible that the creation of a new family of molecules of VLS inhibitors will allow these molecules to exert maximal beneficial effects. For example, a reduced toxicity of DT therapeutic agents using the compositions and methods disclosed herein may allow larger patient population to be treated or more advanced disease to be treated (e.g., a cancer or graft versus host disease). In certain embodiments, modified proteins or fusion proteins based on the (x)D(y) and/or (x)D(y)T motif or its flanking sequences may be used to inhibit VLS or other activities in vivo.

[0072] To produce peptides, polypeptides or proteins that lack the (x)D(y) and/or (x)D(y)T sequence, one could delete or mutate the conserved aspartic acid (D), substitute another amino acid for the aspartic acid, or insert one or more amino acids at or adjacent to its position. Modifications contemplated herein include a substitution of the (D) residue in the sequence by an amino acid residue selected from among isoleucine (I), valine (V), leucine (L), phenylalanine (F), cysteine (C), methionine (M), alanine (A), glycine (G), threonine (T), tryptophan (W), tyrosine (Y), proline (P), histidine (H), glutamine (Q), asparagine (N), lysine (K), arginine (R) and a modified or unusual amino acid from Table 1, as a consequence of a deletion or mutation event.

TABLE 1

| Abbreviation | Amino acid | Abbreviation | Amino acid |
|---|---|---|---|
| Aad | 2-Aminoadipic acid | EtAsn | N-Ethylasparagine |
| BAad | 3-Aminoadipic acid | Hyl | Hydroxylysine |
| BAla | β-alanine, β-Amino- | Ahyl | Allo-Hydroxylysine |
| | propionic acid | | |
| Abu | 2-Aminobutyric acid | 3Hyp | 3-Hydroxyproline |
| 4Abu | 4--Aminobutyric acid, | 4Hyp | 4-Hydroxyproline |
| | piperidinic acid | | |
| Acp | 6-Aminocaproic acid | Ide | Isodesmosine |
| Ahe | 2-Aminoheptanoic | Aile | Allo-Isoleucine |
| | acid | | |
| Aib | 2-Aminoisobutyric | MeGly | N-Methylglycine, |
| | acid | | sarcosine |
| BAib | 3-Aminoisobutyric | MeIle | N-Methylisoleucine |
| | acid | | |
| Apm | 2-Aminopimelic acid | MeLys | 6-N-Methyllysine |
| Dbu | 2,4-Diaminobutyric | MeVal | N-Methylvaline |
| | acid | | |
| Des | Desmosine | Nva | Norvaline |
| Dpm | 2,2′-Diaminopropionic | Nle | Norleucine |
| | acid | | |
| Dpr | 2,3-Diaminopropionic | Orn | Ornithine |
| | acid | | |
| EtGly | N-Ethylglycine | | |

[0073] Alternatively the (x) residue could be deleted, substituted, or moved by the insertion of one or more amino acids, to remove the (x)D(y) and/or (x)D(y)T sequence. Modifications contemplated herein include a substitution of the (x) residue in the sequence by an amino acid residue selected from among phenylalanine (F), cysteine (C), methionine (M), threonine (T), tryptophan (W), tyrosine (Y), proline (P), histidine (H), glutamic acid (E), glutamine (Q), aspartic acid (D), asparagine (N), lysine (K), arginine (R) and a modified or unusual amino acid from Table 1 as a consequence of the deletion or mutation event. For example, a V or I amino acid residue as described is replaced with any of such amino acid residues.

[0074] Or the (y) residue could be deleted, substituted, or moved by the insertion of one or more amino acids, to remove the (x)D(y) and/or (x)D(y)T sequence. An amino acid that may replace the (y) residue in the sequence as a consequence of the deletion or mutation event is, for example, isoleucine (I); phenylalanine (F); cysteine/cystine (C); methionine (M); alanine (A); glycine (G); threonine (T); tryptophan (W); tyrosine (Y); proline (P); histidine (H); glutamic acid (E); glutamine (Q); aspartic acid (D); asparagine (N); lysine (K); and arginine (R), and including, but not limited to, those shown at Table 1.

[0075] In one embodiment, a modified diphtheria toxin contains one or more modifications selected from among V7T, V7N, V7D, D8N, S9A, S9T, S9G, V29N, V29D, V29T, D30N, S31G, S31N, I290T, S292A, S292G and S292T.

[0076] In one embodiment, a modified diphtheria toxin contains two modifications. Such modified diphtheria toxins can contain a combination of mutations such as, for example, V7N V29N, V7N V29T, V7N V29D, V7T V29N, V7T V29T or V7T V29D.

[0077] In one embodiment, a modified diphtheria toxin contains three modifications. Such modified diphtheria toxins can contain a combination of mutations such as, for example, V7N V29N I290N, V7N V29N I290T, V7N V29N S292A, V7N V29N S292T, V7N V29T I290N, V7N V29T I290T, V7N V29T S292A, V7N V29T S292T, or V7T V29T I290T.

[0078] Other residues that are positioned in the physical region, three-dimensional space, or vicinity of the HUVEC binding site and/or the (x)D(y) motif may be mutated or altered to abrogate, reduce, or eliminate VLS. The amino acids targeted for mutation in the flanking regions include amino acids on or near the surface of a native DT protein. The alteration may remove or substitute a charged residue in the region of a (x)D(y) motif, which may negate or reverse the charge in a particular area on the surface of the protein. The alteration may also change size and/or hydrophilic nature of an amino acid in the physical region, space or vicinity of the (x)D(y) sequence or active site of a protein. For example, LDV constitutes the minimal active site in the CS1 domain of fibronectin responsible for its binding to the α4β1 integrin receptor (Makarem and Humphries, 1991; Wayner and Kovach, 1992; Nowlin et al., 1993). However, fibronectin (FN) does not damage HUVECs. Instead, FN protects HUVECs from RTA-mediated damage (Baluna et al., 1996). Unlike RTA, FN has a C-terminal LDV-flanking proline instead of a threonine. In disintegrins, residues flanking RGD play a role in ligand binding (Lu et al., 1996). The difference between the ability of an LDV or homologue-containing molecule to promote vascular integrity (e.g., FN) or disrupt it (e.g., DT) may depend on the orientation, or availability for interaction (i.e., binding), of the LDV motif and hence, on flanking sequences. Therefore, changes in one or more flanking residues of the (x)D(y) sequence may enhance or reduce the ability of a molecule to promote VLS. Further, changes that expose the (x)D(y) sequence to the external surface of the protein so as to interact with other proteins, such as receptors, would enhance VLS promoting activity, while conformations that are less exposed may reduce VLS promoting activity.

[0079] At least one mutation, chemical modification, movement or other alteration in the N- or C-terminal flanking sequences of the (x)D(y) and/or (x)D(y)T sequence may also produce polypeptides that have a reduced ability to promote VLS. Such mutations or alterations can occur in one or more residues which will not affect the active site. In other embodiments, the mutations or alterations can occur in one or more residues of from about 1, about 2, about 3, about 4, about 5, about 6 or more N-terminal and/or C-terminal to the (x)D(y) tripeptide sequence. In other aspects, one or more residues that are not adjacent to the (x)D(y) tripeptide may contribute to the function of the (x)D(y) motif. Such residues may be identified by their proximity to the tripeptide sequence in a 3-dimensional model, as described herein and as would be known to one of ordinary skill in the art, and are contemplated for alteration as part of a flanking sequence. Such alterations may include any of those described above for altering the (x)D(y) and (x)D(y)T sequences, as long as one or more “wild type” flanking residues are altered, removed, moved, chemically modified, etc.

[0080] Such amino acid modifications can be assayed for the ability to effectively deliver the catalytic domain of DT to a targeted cell within the context of a fusion protein, and not reconstitute an intact VLS motif. Provided herein are modified diphtheria toxins that have a reduced ability to induce VLS; any remaining (x)D(y) and/or (x)D(y)T sequences, if possible, are to have a reduced exposure to the surface of the polypeptide.

[0081] For example, it is contemplated that (x)D(y) and/or (x)D(y)T sequences that are at least partly located in the non-exposed portions of a diphtheria toxin, or otherwise masked from full or partial exposure to the surface of the molecule, would interact less with cells, receptors or other molecules to promote or induce VLS. Thus, it is contemplated that the complete elimination of (x)D(y) and/or (x)D(y)T sequences from the primary structure of the diphtheria toxin is not necessary to produce toxins or molecules with a reduced ability to induce or promote VLS. However, in one embodiment, all (x)D(y) and/or (x)D(y)T sequences are removed to generate a composition that has the least ability to induce or promote VLS.

[0082] To determine whether a mutation would likely produce a modified diphtheria toxin with a less exposed (x)D(y) and/or (x)D(y)T motif, the putative location of the moved or added (x)D(y) and/or (x)D(y)T sequence could be determined by comparison of the mutated sequence to that of the unmutated diphtheria toxin's secondary and tertiary structure, as determined by such methods known to those of ordinary skill in the art including, but not limited to, X-ray crystallography, NMR or computer modeling. Computer models of various polypeptide and peptide structures are also available in the literature or computer databases. In a non-limiting example, the Entrez database (www.ncbi.nlm.nih.gov/Entrez/) can be used to identify target sequences and regions for mutagenesis. The Entrez database is cross-linked to a database of 3-D structures for the identified amino acid sequence, if known. Such molecular models can be used to identify (x)D(y), (x)D(y)T and/or flanking sequences in diphtheria toxin that are more exposed to contact with external molecules, (e.g. receptors) than similar sequences embedded in the interior of the polypeptide or polypeptide. It is contemplated that (x)D(y), (x)D(y)T and/or flanking sequences that are more exposed to contact with external molecules are more likely to contribute to promoting or reducing VLS and other toxic effects associated with these sequences, and, thus, should be primary targets for mutagenesis. In certain embodiments, when adding at least one (x)D(y), (x)D(y)T and/or flanking sequence is desirable, regions of the protein that are more exposed to contact with external molecules are preferred as sites to add such a sequence. The mutated or wild-type diphtheria toxin's structure could be determined by X-ray crystallography or NMR directly before use in in vitro or in vivo assays, as would be known to one of ordinary skill in the art.

[0083] Once an amino acid sequence comprising a (x)D(y) and/or (x)D(y)T sequence is altered in a diphtheria toxin, changes in its ability to promote at least one toxic effect can be assayed by any of the techniques described herein or as would be known to one of ordinary skill in the art. Methods of altering (changing) amino acid sequences are described in more detail below and are known in the art.

[0084] Modifications (changes) are those amino acid substitutions, insertions or deletions which permit the alteration of a native sequence or a previously modified sequence within these regions but do not impair the cytotoxicity of a DT toxophore. These modifications would not include those that regenerate the VDS/IDS sequences responsible for mediating the interaction with endothelial cells. Such non-native recombinant sequences therefore comprise a novel series of mutants that maintain the native function of the unique domains of diphtheria toxin while significantly decreasing their ability to interact with vascular endothelial cells.

[0085] Provided herein are modified diphtheria toxins, said modified diphtheria toxin comprising an amino acid sequence as set forth in SEQ ID NO: 2 or 149 with one or more amino acid modifications therein, wherein at least one amino acid modification is made within an (x)D(y) motif in a region selected from among residues 7-9, 29-31 and 290-292 of SEQ ID NO: 2 or 149, and said modified diphtheria toxin has cytotoxicity comparable to an unmodified diphtheria toxin. In one embodiment, a modification at position (x) is a substitution of V or I by an amino acid residue selected from among F, C, M, T, W, Y, P, H, E, Q, D, N, K, R, and a modified or unusual amino acid from Table 1. In one embodiment, a modification at position D is a substitution of D by an amino acid residue selected from among I, V, L, F, C, M, A, G, T, W, Y, P, H, Q, N, K, R and a modified or unusual amino acid from Table 1. In one embodiment, a modification at position (y) is a substitution of S by an amino acid residue selected from among I, F, C, M, A, G, T, W, Y, P, H, E, Q, D, N, K, R and a modified or unusual amino acid from Table 1. In another embodiment, a modified diphtheria toxin has a combination of two, three or more modifications in one or more (x)D(y) motifs.

[0086] In one embodiment, a modified diphtheria toxin contains one or more modifications selected from among V7T, V7N, V7D, D8N, S9A, S9T, S9G, V29N, V29D, V29T, D30N, S31G, S31N, I290T, S292A, S292G and S292T.

[0087] In one embodiment, a modified diphtheria toxin contains two modifications. Such modified diphtheria toxins can contain a combination of mutations such as, for example, V7N V29N, V7N V29T, V7N V29D, V7T V29N, V7T V29T or V7T V29D.

[0088] In one embodiment, a modified diphtheria toxin contains three modifications. Such modified diphtheria toxins can contain a combination of mutations such as, for example, V7N V29N I290N, V7N V29N I290T, V7N V29N S292A, V7N V29N S292T, V7N V29T I290N, V7N V29T I290T, V7N V29T S292A, V7N V29T S292T, or V7T V29T I290T.

[0089] Unmodified diphtheria toxins can have, for example, an amino acid sequence of SEQ ID NO: 2, 149 or an amino acid sequence of any one of SEQ ID NOS: 4-147. DT387 (SEQ ID NO: 2) is a truncated DT protein comprising an N-terminal a methionine residue, and amino acid residues 1-386 of the native DT protein which include the catalytic domain and the translocation domain. DT389 (SEQ ID NO: 149) is a truncated DT protein including in order, a methionine residue, residues 1-386 of native DT and residues 484-485 of native DT. In one embodiment, DT variants contain at least one modifications within one of the (x)D/E(y) motifs of the DT molecule, i.e., within residues 7-9 (VDS), residues 29-31 (VDS), and residues 290-292 (IDS) of SEQ ID NO:2 or 149 to eliminate motifs that are associated with VLS and thereby reduce the clinical adverse effects commonly associated with this syndrome. In one embodiment, a modified diphtheria toxin having cytotoxicity comparable to an unmodified diphtheria toxin refers to a modified diphtheria toxin having cytotoxicity substantially similar to, or with at least about 70%, at least about 75%, at least about 80%, at least about 85%, at least about 90%, or at least about 95% or more cytotoxicity compared to an unmodified diphtheria toxin. Purified DAB₃₉₈IL-2 produced in E. coli generally yields an IC₅₀ of between about 5×10⁻¹¹ M to about 1×10⁻¹² M. Thus, in another embodiment, a modified diphtheria toxin having cytotoxicity comparable to an unmodified diphtheria toxin refers to a modified diphtheria toxin having an IC₅₀ of between about 5×10⁻¹¹ M to about 1×10⁻¹² M, of about 1×10⁻¹⁰ M to about 1×⁻¹⁰ M, of about 1×10⁻⁹ M to about 1×10⁻¹⁰ M, or of about 1×10⁻⁸ M to about 1×10⁻⁹ M. Cytotoxicity of a modified diphtheria toxin compared to an unmodified diphtheria toxin can be tested in a cytotoxicity assay such as those described below in the Examples.

[0090] Modified diphtheria toxins provided herein have reduced binding activity to human vascular endothelial cells (HUVECs) compared to an unmodified diphtheria toxin. Such compositions can further comprise a non-diphtheria toxin polypeptide including, but not limited to, an antibody or antigen-binding fragment thereof, EGF, IL-1, IL-2, IL-3, IL-4, IL-5, IL-6, IL-7, IL-8, IL-9, IL-10, IL-11, IL-12, IL-13, IL-14, IL-15, INFα, INFγ, GM-CSF, G-CSF, M-CSF, TNF, VEGF, Ephrin, BFGF, TGF or a cell-specific binding ligand. The non-diphtheria toxin polypeptide can also be a fragment of such polypeptides, such as a cell-binding portion thereof. In one embodiment, the non-diphtheria toxin polypeptide is IL-2 or a cell-binding portion thereof.

[0091] DT variants of the present application contain at least one modifications within one of the (x)D(y) motifs of the DT molecule, i.e., within residues 6-8 (VDS), residues 28-30 (VDS), and residues 289-291 (IDS) of SEQ ID NO: 1, or within residues 7-9 (VDS), residues 29-31 (VDS), and residues 290-292 (IDS) of SEQ ID NO: 2 or 149 to eliminate motifs that are associated with VLS and thereby reduce the clinical adverse effects commonly associated with this syndrome. The modified DTs of the present application, however, are as effective and efficient as DT387 in their ability to facilitate the delivery of its catalytic domain to the cytosol of targeted eukaryotic cells when incorporated into protein fusion toxins.

[0092] In addition to the modification in the (x)D(y) motifs, the modified DTs can further comprise a deletion or substitution of about 1 to about 30 amino acids, about 1 to about 10 amino acids, or about 1 to about 3 amino acids of SEQ ID NO: 2 or 149, so long as the truncated molecule retains the ability to translocate into cells and kill target cells when the truncated molecule is fused with a cell binding domain.

[0093] Provided herein is a modified diphtheria toxin having one or more amino acid modifications therein, wherein at least one amino acid modification is made within an (x)D(y) motif in a region selected from the group consisting of residues 7-9, 29-31 and 290-292 of SEQ ID NO 2 or 149, and wherein said modified diphtheria toxin has cytotoxicity comparable to an unmodified diphtheria toxin. In one embodiment, a modification at position (x) is a substitution of V or I by an amino acid residue selected from among F, C, M, T, W, Y, P, H, E, Q, D, N, K, R, and a modified or unusual amino acid from Table 1. In another embodiment, a modification at position D is a substitution of D by an amino acid residue selected from among I, V, L, F, C, M, A, G, T, W, Y, P, H, Q, N, K, R and a modified or unusual amino acid from Table 1. In another embodiment, a modification at position (y) is a substitution of S by an amino acid residue selected from among I, F, C, M, A, G, T, W, Y, P, H, E, Q, D, N, K, R and a modified or unusual amino acid from Table 1. In another embodiment, a modified diphtheria toxin has a combination of two, three or more modifications in one or more (x)D(y) motifs.

[0094] In one embodiment, a modified diphtheria toxin contains one or more modifications selected from among V7T, V7N, V7D, D8N, S9A, S9T, S9G, V29N, V29D, V29T, D30N, S31G, S31N, I290T, S292A, S292G and S292T.

[0095] In one embodiment, a modified diphtheria toxin contains two modifications. Such modified diphtheria toxins can contain a combination of mutations such as, for example, V7N V29N, V7N V29T, V7N V29D, V7T V29N, V7T V29T or V7T V29D.

[0096] In one embodiment, a modified diphtheria toxin contains three modifications. Such modified diphtheria toxins can contain a combination of mutations such as, for example, V7N V29N I290N, V7N V29N I290T, V7N V29N S292A, V7N V29N S292T, V7N V29T I290N, V7N V29T I290T, V7N V29T S292A, V7N V29T S292T, or V7T V29T I290T.

[0097] Modified diphtheria toxins can contain, about 1, 2, 3, 4, 5, 6, 7, 8, 9, 10, 11, 12, 13, 14, 15, 16, 17, 18, 19, or up to about 20 modifications within one or more (x)D/E(y) motifs. Functional activity of such modified diphtheria toxins can be tested in a cytotoxicity assay or another assay described herein or known in the art. Modified diphtheria toxins containing more than one modification can be made, using the methods described herein, by sequentially modifying amino acid residues and comparing activity after each modification to the previously unmodified or previously modified diphtheria toxin. Alternatively, modified diphtheria toxins containing more than one modification can be made, using the methods described herein, by modifying two or more amino acid residues at the same time and comparing activity to the previously unmodified diphtheria toxin.

[0098] Modified diphtheria toxins can be tested for activity using assays known in the art and described herein including, but not limiting to, cytotoxicity assays and ADP ribosylation assays.

[0099] B. Methods of Making Modified Polypeptides

[0100] In certain aspects, mutagenesis of nucleic acids encoding polypeptides can be used to produce the desired modifications in the (x)D(y) and flanking sequences of the modified DTs. Mutagenesis can be conducted by any means disclosed herein or known to one of ordinary skill in the art.

[0101] One particularly useful mutagenesis technique is alanine scanning mutagenesis in which a number of residues are substituted individually with the amino acid alanine so that the effects of losing side-chain interactions can be determined, while minimizing the risk of large-scale perturbations in protein conformation (Cunningham et al., Science, 2:244(4908):1081-5 (1989).

[0102] As specific amino acids can be targeted, site-specific mutagenesis is a technique useful in the preparation of individual peptides, or biologically functional equivalent proteins or peptides, through specific mutagenesis of the underlying polynucleotide. As used herein a “codon” refers to the three nucleotides which, when transcribed and translated, encode a single amino acid residue; or in the case of UUA, UGA or UAG encode a termination signal. Codons encoding amino acids are well known in the art. The technique further provides a ready ability to prepare and test sequence variants, incorporating one or more of the foregoing considerations, by introducing one or more nucleotide sequence changes into the DNA. Site-specific mutagenesis allows the production of mutants through the use of specific oligonucleotide sequences which encode the DNA sequence of the desired mutation, as well as a sufficient number of adjacent nucleotides, to provide a primer sequence of sufficient size and sequence complexity to form a stable duplex on both sides of the mutation site being traversed. Typically, a primer of about 17 to 25 nucleotides in length is used, with about 5 to 10 residues on both sides of the junction of the sequence being altered.

[0103] In general, the technique of site-specific mutagenesis is well known in the art. Briefly, a bacteriophage vector that will produce a single stranded template for oligonucleotide directed PCR mutagenesis can be employed. Phage vectors (e.g., M13), are commercially available and their use is generally well known to those in the art. Similarly, double stranded plasmids are also routinely employed in site directed mutagenesis, which eliminates the step of transferring a polynucleotide of interest from a phage to a plasmid. Synthetic oligonucleotide primers bearing the desired mutated sequence can be used to direct the in vitro synthesis of modified (desired mutant) DNA from this template and the heteroduplex DNA is used to transform competent E. coli for the growth selection and identification of desired clones. Alternatively, a pair of primers can be annealed to two separate strands of a double stranded vector to simultaneously synthesize both corresponding complementary strands with the desired mutation(s) in a PCR reaction.

[0104] In one embodiment, the Quick Change site-directed mutagenesis method using plasmid DNA templates as described by Sugimoto et al. can be employed (Sugimoto et al., Annal. Biochem., 179(2):309-311 (1989)). PCR amplification of the plasmid template containing the insert target polynucleotide of insert is achieved using two synthetic oligonucleotide primers containing the desired mutation. The oligonucleotide primers, each complementary to opposite strands of the vector, are extended during temperature cycling by mutagenesis-grade PfuTurbo DNA polymerase. On incorporation of the oligonucleotide primers, a mutated plasmid containing staggered nicks is generated. Amplified un-methylated products are treated with Dpn I to digest methylated parental DNA template and select for the newly synthesized DNA containing mutations. Since DNA isolated from most E. coli strains is dam methylated, it is susceptible to Dpn I digestion, which is specific for methylated and hemimethylated DNA. The reaction products are transformed into high efficiency strains of E. coli to obtain plasmids containing the desired modifications. Additional methods for introducing amino acid modifications into a polypeptide are known in the art and can also be used herein.

[0105] The preparation of sequence variants of the selected gene using site-directed mutagenesis is provided as a means of producing potentially useful species and is not meant to be limiting, as there are other ways in which sequence modifications of polynucleotides can be obtained. For example, recombinant vectors encoding the desired gene can be treated with mutagenic agents, such as hydroxylamine, to obtain sequence variants. These basic techniques, the protocols for sequence determination, protein expression and analysis are incorporated by reference to citations in this specification and are generally accessible to those reasonably skilled in the art within Current Protocols in Molecular Biology (Fred M. Ausubel, Roger Brent, Robert E. Kingston, David D. Moore, J. G. Seidman, John A. Smith, Kevin Struhl, Editors John Wiley and Sons Publishers (1989)). In accordance with the present application, there may be employed conventional molecular biology, microbiology, and recombinant DNA techniques within the skill of the art. Such techniques are explained fully in the literature. See, e.g., Sambrook et al, “Molecular Cloning: A Laboratory Manual” (1989); “Current Protocols in Molecular Biology” Volumes I-III [Ausubel, R. M., ed. (1994)]; “Cell Biology: A Laboratory Handbook” Volumes I-III [J. E. Celis, ed. (1994))]; “Current Protocols in Immunology” Volumes I-III [Coligan, J. E., ed. (1994)]; “Oligonucleotide Synthesis” (M. J. Gait ed. 1984); “Nucleic Acid Hybridization” [B. D. Hames & S. J. Higgins eds. (1985)]; “Transcription And Translation” [B. D. Hames & S. J. Higgins, eds. (1984)]; “Animal Cell Culture” [R. I. Freshney, ed. (1986)]; “Immobilized Cells And Enzymes” [IRL Press, (1986)]; B. Perbal, “A Practical Guide To Molecular Cloning” (1984), each of which is specifically incorporated herein by reference in its entirety.

### III. Fusion Proteins

[0106] The present invention also provides DT fusion proteins. A DT fusion protein contains a DT-related polypeptide (e.g., a modified DT described herein) and a non-DT polypeptide fused in-frame to each other. The DT-related polypeptide corresponds to all or a portion of modified DT exhibiting (having) reduced binding to human vascular endothelial cells. In one embodiment, a DT fusion protein comprises at least one portion of a modified DT sequence described above such as, for example, a polypeptide having an amino acid sequence set forth in one of SEQ ID NOS: 4-147 or a polypeptide having two or more modifications of SEQ ID NOS: 4-147.

[0107] Modified DT polypeptides can be fused to, for example, a non-DT polypeptide. In one embodiment, the non-DT polypeptide is a cell-specific binding ligand. The specific-binding ligands used in the invention can contain an entire ligand, or a portion of a ligand which includes the entire binding domain of the ligand, or an effective portion of the binding domain. It is most desirable to include all or most of the binding domain of the ligand molecule.

[0108] In another embodiment, the modified toxin is a fusion toxin wherein the cell binding domain is an antibody or antigen-binding fragment thereof. An antibody can be, for example, monoclonal, polyclonal, humanized, genetically engineered, or grafted. An antigen-binding fragment can be, for example, a Fab, Fab₂, a F(ab′)₂, a scFv, a scFv2 (a tandem linkage of two scFv molecules head to tail in a chain), a single chain binding polypeptide, a VH or a VL. Methods of making antigen-binding fragments are known in the art and are incorporated herein. Useful antibodies include those that specifically bind to a receptor or other moiety expressed on the surface of the target cell membrane or tumor associated antigens.

[0109] “Specifically binds” means that the binding agent binds to the antigen on the target cell with greater affinity than it binds unrelated antigens. Preferably such affinity is at least about 10-fold greater, at least about 100-fold greater, or at least about 1000-fold greater than the affinity of the binding agent for unrelated antigens. The terms “immunoreactive” and “specifically binds” are used interchangeably herein. In certain embodiments, the anti-tumor antibodies or antigen-binding fragments thereof (e.g., scFv) are those which recognize a surface determinant on the tumor cells and are internalized in those cells via receptor-mediated endocytosis. In a further embodiment, the antibody or antigen binding fragment thereof binds to a B-cell surface molecule such as, for example, the B-cell surface molecule is CD19 or CD22. Alternatively, the antibody or antigen binding fragment thereof, binds to the ovarian receptor MISIIR (Mullerian Inhibitory Substance type II receptor).

[0110] Cell-specific binding ligands can also include, but are not limited to: polypeptide hormones, e.g., those made using the binding domain of α-MSH, can selectively bind to melanocytes, allowing the construction of improved DT-MSH chimeric toxins useful in the treatment of melanoma. (Murphy, J. R. et al., Proc. Natl. Acad. Sci. U.S.A., 83(21):8258-8262 (1986)). Other cell-specific binding ligands which can be used include insulin, somatostatin, interleukins I and III, and granulocyte colony stimulating factor. Other useful polypeptide ligands having cell-specific binding domains are follicle stimulating hormone (specific for ovarian cells), luteinizing hormone (specific for ovarian cells), thyroid stimulating hormone (specific for thyroid cells), vasopressin (specific for uterine cells, as well as bladder and intestinal cells), prolactin (specific for breast cells), and growth hormone (specific for certain bone cells). Specific-binding ligands which can be used include cytokines including, but not limited to, IL-1, IL-2, IL-3, IL-4, IL-5, IL-6, IL-7, IL-8, IL-9, IL-10, IL-11, IL-12, IL-13, IL-14, IL-15, β-interferon, α-interferon (INF-α), INF-γ, angiostatin, thrombospondin, endostatin, METH-1, METH-2, GM-CSF, G-CSF, M-CSF, tumor necrosis factor (TNF), SVEGF, TGF-β, Flt3 and B-cell growth factor that bind to receptors on cells. IL-2 is of particular importance because of its role in allergic reactions and autoimmune diseases such as systemic lupus erythmatosis (SLE), involving activated T cells. DT fusion proteins made using IL-2 B-cell growth factor can be used as immunosuppressant reagents which kill proliferating B-cells (cancer cells), which bear high affinity IL-2 receptors or B-cell growth factor receptors, and which are involved in hypersensitivity reactions, organ rejection and graft versus host disease. Other cytokines include Substance P (Benoliel et al., Pain, 79(2-3):243-53 (1999)), VEGF (Hotz et al., J Gastrointest Surg., 6(2): 159-66 (2002)), IL-3 (Jo et al., Protein Exp Purif. 33(1):123-33 (2004)) and GM-CSF (Frankel et al., Clin Cancer Res, 8(5):1004-13 (2002)). VLS modified DT fusion toxins using these ligands are useful in treating cancers or other diseases of the cell type to which there is specific binding.

[0111] In IL-2, a LDL sequence (a “VLS” motif) at residues 19-21 (SEQ ID NO: 3) is located in an α-helix and is also partially exposed. A mutation in Asp-20 to Lys, in the LDL motif eliminates binding of IL-2 to the 0 chain of the IL-2 receptor and subsequent cell proliferation (Collins et al., 1988). It has been reported that IL-2 directly increases the permeability of the vascular endothelium to albumin in vitro and that this effect can be inhibited by anti-IL-2 receptor monoclonal antibodies (Downie et al., 1992). The LDL sequence in IL-2 damages HUVECs. The Asp-20 in the LDL of IL-2 is involved in receptor binding and functional activity (Collins et al., 1988). Thus, it is contemplated that in certain embodiments, mutations in IL-2's (x)D(y) sequence and/or flanking sequence(s) to eliminate or reduce VLS should preserve the Asp-20 or the biological activity of IL-2 may be reduced.

[0112] For a number of cell-specific binding ligands, the region within each such ligand in which the binding domain is located is now known. Furthermore, advances in solid phase polypeptide synthesis enable those skilled in this technology to determine the binding domain of practically any such ligand, by synthesizing various fragments of the ligand and testing them for the ability to bind to the class of cells to be labeled using conventional methods known in the art such as an ELISA assay. Thus, the chimeric genetic fusion toxins described herein need not include an entire ligand, but rather can include only a fragment of a ligand which exhibits the desired cell-binding capacity. Likewise, analogs of the ligand or its cell-binding region having minor sequence variations can be synthesized, tested for their ability to bind to cells, and incorporated into the hybrid molecules of the invention. If needed, the amino acid sequences of cell-binding polypeptides can be analyzed for one or more VLS motifs and modified according to the concepts described herein. Other potential ligands include antibodies (e.g., monoclonal) or antigen-binding, single-chain analogs of monoclonal antibodies, where the antigen is a receptor or other moiety expressed on the surface of the target cell membrane. The antibodies most useful are those against tumors; such antibodies are already well-known targeting agents used in conjunction with covalently bound cytotoxins. In the present invention, anti-tumor antibodies (preferably not the whole antibody, but just an scFv derived therefrom) are those which recognize a surface determinant on the tumor cells and are internalized in those cells via receptor-mediated endocytosis.

[0113] In one aspect, a DT-fusion protein is produced by standard recombinant DNA techniques. For example, DNA fragments coding for the different polypeptide sequences are ligated together in-frame in accordance with conventional techniques, for example, by employing blunt-ended or stagger-ended termini for ligation, restriction enzyme digestion to provide for appropriate termini, filling-in of cohesive ends as appropriate, alkaline phosphatase treatment to avoid undesirable joining, and enzymatic ligation. In another embodiment, the fusion gene can be synthesized by conventional techniques including automated DNA synthesizers. Alternatively, PCR amplification of gene fragments can be carried out using anchor primers which give rise to complementary overhangs between two consecutive gene fragments which can subsequently be annealed and reamplified to generate a chimeric gene sequence.

[0114] If needed for proper conformational folding of the fusion protein, a peptide linker sequence can be employed to separate the DT-related polypeptide from non-DT polypeptide components by a distance sufficient to ensure that each polypeptide folds into its secondary and tertiary structures. Such a peptide linker sequence can be incorporated into the fusion protein using standard techniques well known in the art and can be chosen based on the following factors: (1) their ability to adopt a flexible extended conformation; (2) its inability to adopt a secondary structure that could interact with functional epitopes on the DT-related polypeptide and non-DT polypeptide; and (3) the lack of hydrophobic or charged residues that might react with the polypeptide functional epitopes. Certain peptide linker sequences contain Gly, Asn and Ser residues or Gly, Asp and Ser residues. Other near neutral amino acids, such as Thr and Ala, can also be used in the linker sequence. Another peptide linker sequence contains His and Ala (residues 484-485 of native diphtheria toxin). Amino acid sequences which can be usefully employed as linkers include, but are not limited to, those disclosed in Maratea et al., Gene, 40:39-46, 1985; Murphy et al., Proc. Natl. Acad. Sci. USA, 83:8258-8262, 1986; U.S. Pat. No. 4,935,233 and U.S. Pat. No. 4,751,180. The linker sequence can generally be from 1 to about 50 amino acids in length. Linker sequences may not be required when the DT-related polypeptide and non-DT polypeptide have non-essential N-terminal amino acid regions that can be used to separate the functional domains and prevent steric interference.

[0115] Provided herein are fusion proteins comprising a polypeptide toxophore from a modified diphtheria toxin, and a non-diphtheria toxin polypeptide, said polypeptide toxophore comprising a diphtheria toxin having an amino acid sequence as recited in SEQ ID NO: 2 or 149 with one or more amino acid modifications therein, wherein at least one amino acid modification is made within an (x)D(y) motif in a region selected from among residues 7-9, 29-31 and 290-292 of SEQ ID NO: 2 of 149, and said modified diphtheria toxin has cytotoxicity comparable to an unmodified diphtheria toxin. In one embodiment, a modification at position (x) is a substitution of V or I by an amino acid residue selected from among F, C, M, T, W, Y, P, H, E, Q, D, N, K, R, and a modified or unusual amino acid from Table 1. In one embodiment, a modification at position D is a substitution of D by an amino acid residue selected from among I, V, L, F, C, M, A, G, T, W, Y, P, H, Q, N, K, R and a modified or unusual amino acid from Table 1. In another embodiment, a modification at position (y) is a substitution of S by an amino acid residue selected from among I, F, C, M, A, G, T, W, Y, P, H, E, Q, D, N, K, R and a modified or unusual amino acid from Table 1. In another embodiment, a modified diphtheria toxin has a combination of two, three or more modifications in one or more (x)D(y) motifs.

[0116] In one embodiment, a modified diphtheria toxin contains one or more modifications selected from among V7T, V7N, V7D, D8N, S9A, S9T, S9G, V29N, V29D, V29T, D30N, S31G, S31N, I290T, S292A, S292G and S292T.

[0117] In one embodiment, a modified diphtheria toxin contains two modifications. Such modified diphtheria toxins can contain a combination of mutations such as, for example, V7N V29N, V7N V29T, V7N V29D, V7T V29N, V7T V29T or V7T V29D.

[0118] In one embodiment, a modified diphtheria toxin contains three modifications. Such modified diphtheria toxins can contain a combination of mutations such as, for example, V7N V29N I290N, V7N V29N I290T, V7N V29N S292A, V7N V29N S292T, V7N V29T I290N, V7N V29T I290T, V7N V29T S292A, V7N V29T S292T, or V7T V29T I290T.

[0119] In one embodiment, a modified diphtheria toxin having cytotoxicity comparable to an unmodified diphtheria toxin refers to a modified diphtheria toxin having cytotoxicity substantially similar to, or with at least about 70%, at least about 75%, at least about 80%, at least about 85%, at least about 90%, or at least about 95% or more cytotoxicity compared to an unmodified diphtheria toxin. Purified DAB₃₈₉IL-2 (also known as denileukin diflitox and ONTAK®) produced in E. coli generally yields an IC₅₀ of between about 5×10⁻¹¹ M to about 1×10⁻¹² M. Thus, in another embodiment, a modified diphtheria toxin having cytotoxicity comparable to an unmodified diphtheria toxin refers to a modified diphtheria toxin having an IC₅₀ of between about 5×10⁻¹¹ M to about 1×10⁻¹² M, of about 1×10⁻¹⁰ M to about 1×10⁻¹⁰ M, of about 1×10⁻⁹ M to about 1×10⁻¹⁰ M, or of about 1×10⁻⁸ M to about 1×10⁻⁹ M. Cytotoxicity of a modified diphtheria toxin compared to an unmodified diphtheria toxin can be tested in a cytotoxicity assay such as that described below.

[0120] The fusion proteins have reduced binding to human vascular endothelial cells compared to, for example, a diphtheria toxin molecule having a sequence of SEQ ID NOS: 1, 2 or 149.

[0121] The non-diphtheria toxin polypeptide can be, for example, an antibody or an antigen-binding fragment thereof, EGF, IL-1, IL-2, IL-3, IL-4, IL-5, IL-6, IL-7, IL-8, IL-9, IL-10, IL-11, IL-12, IL-13, IL-14, IL-15, INFα, INFγ, GM-CSF, G-CSF, M-CSF, TNF, VEGF, Ephrin, βFGF, TGF, or a cell-specific binding portion thereof. In one embodiment, the non-diphtheria toxin polypeptide is IL-2 or a cell-specific binding portion thereof.

[0122] Chemical crossing or conjugation results in a variety of molecular species representing the reaction products, and typically only a small fraction of these products are catalytically and biologically active. The cross-linking of DT with the cell binding region is one aspect of the invention. In one embodiment, a cross-linker which presents a disulfide function can be used such that the toxin moiety is releasable from the binding agent once the agent has delivered the toxin inside the targeted cells. Each type of cross-linker, as well as how the cross-linking is performed, will tend to vary the pharmacodynamics of the resultant conjugate. Ultimately, one desires to have a conjugate that will remain intact under conditions found everywhere in the body except the intended site of action, at which point it is desirable that the conjugate have good release characteristics. Therefore, a particular cross-linking scheme, including in particular the particular cross-linking reagent used and the structures that are cross-linked, are considered herein.

[0123] Cross-linking reagents are used to form molecular bridges that tie together functional groups of two different proteins (e.g., DT and a cell binding ligand). To link two different proteins in a step-wise manner, heterobifunctional cross-linkers can be used which eliminate the unwanted homopolymer formation. An exemplary heterobifunctional cross-linker contains two reactive groups: one reacting with primary amine group (e.g., N-hydroxy succinimide) and the other reacting with a thiol group (e.g., pyridyl disulfide, maleimides, halogens, etc.). Through the primary amine reactive group, the cross-linker can react with the lysine residue(s) of one protein (e.g., the selected cell binding ligand) and through the thiol reactive group, the cross-linker, already tied up to the first protein, reacts with the cysteine residue (free sulfhydryl group) of the other protein (e.g., DT).

[0124] The spacer arm between these two reactive groups of any cross-linkers can have various length and chemical composition. A longer spacer arm allows a better flexibility of the conjugate components while some particular components in the bridge (e.g., benzene group) can lend extra stability to the reactive group or an increased resistance of the chemical link to the action of various aspects (e.g., disulfide bond resistant to reducing agents).

[0125] One routinely used cross-linking reagent is SMPT, which is a bifunctional cross-linker containing a disulfide bond that is sterically hindered by an adjacent benzene ring and methyl groups. It is believed that steric hindrance of the disulfide bond serves a function of protecting the bond from attack by thiolate anions such as glutathione which can be present in tissues and blood, and thereby help in preventing decoupling of the conjugate prior to its delivery to the site of action by the binding agent. The SMPT cross-linking reagent, as with many other known cross-linking reagents, lends the ability to crosslink functional groups such as the SH of cysteine or primary amines (e.g., the epsilon amino group of lysine). Another possible type of cross-linker includes the heterobifunctional photoreactive phenylazides containing a cleavable disulfide bond such as sulfosuccinimidyl-2-(p-azido salicylamido) ethyl-1,3′-dithiopropionate. The N-hydroxy-succinimidyl group reacts with primary amino groups and the phenylazide (upon photolysis) reacts non-selectively with any amino acid residue.

[0126] Although hindered cross-linkers can be used, non-hindered linkers can also be employed and advantages in accordance herewith nevertheless realized. Other useful cross-linkers, not considered to contain or generate a protected disulfide include, but are not limited to, SATA, SPDP and 2-iminothiolane. The use of such cross-linkers is well understood in the art.

[0127] In order to be biologically active, the reaction products should be conjugated in manner that does not interfere with the innate structure and activity of the catalytic and translocation domains in the toxophore. Resolution of the active or highly active species from the inactive species is not always feasible as the reaction products often possess similar biophysical characteristics, including for example size, charge density and relative hydrophobicity. It is noteworthy that isolation of large amounts of pure clinical grade active product from chemically cross-linked toxins is not typically economically feasible for the production of pharmaceutical grade product for clinical trials and subsequent introduction to the clinical marketplace. To circumvent this issue, a genetic DT-based protein fusion toxin in which the native DT receptor-binding domain was genetically replaced with melanocyte-stimulating hormone as a surrogate receptor-targeting domain was created (Murphy et al., PNAS, 83:8258-8262 (1986)). This approach was used with human IL-2 as a surrogate targeting ligand to create DAB₄₈₆IL-2 that was specifically cytotoxic only to those cells that expressed the high-affinity form of the IL-2 receptor (Williams et al., Protein Eng., 1:493-498 (1987)). Subsequent studies of DAB₄₈₆IL-2 indicated that truncation of 97 amino acids from the DT portion of the molecule resulted in a more stable, more cytotoxic version of the IL-2 receptor targeted toxin, DAB₃₈₉IL-2 (Williams et al., J. Biol Chem., 265:11885-889 (1990)). The original constructs (the 486 forms) still possessed a portion of the native DT cell binding domain. The DAB₃₈₉ amino acid residue version contains the catalytic (C) and translocation (T) domains of DT with the DT portion of the fusion protein ending in a random coil between the T domain and the relative receptor binding domain. A number of other targeting ligands have since been genetically fused to this DT toxophore, DAB₃₈₉ (vanderSpek et al., Methods in Molecular Biology, Bacterial Toxins: Methods and Protocols., 145:89-99, Humana Press, Totowa, N.J. (2000)). Denileukin diftitox (DAB₃₈₉IL-2, ONTAK®) is a fusion protein containing the enzymatic and translocation domain of diphtheria toxin and the ligand binding domain of recombinant IL-2. Denileukin diftitox binds to intermediate or high affinity IL-2 receptors; however, only binding of denileukin diftitox to the high affinity chain results in receptor endocytosis. Upon acidification of the formed vesicle, the cytotoxic A fragment of diphtheria toxin inhibits protein synthesis by ADP ribosylation of elongation factor 2, resulting in cell death. Similar approaches have now been employed with other bacterial proteins and genetic fusion toxins are often easier to produce and purify.

[0128] The present application provides fusion proteins against target epitopes, such as epitopes expressed on a diseased tissue or a disease causing cell (e.g., IL-2 receptors on cancer cells). In certain embodiments the fusion protein comprises a modified DT described herein. In other embodiments the fusion protein further comprises a second agent. Such an agent can be a molecule or moiety such as, for example, a reporter molecule or a detectable label. Reporter molecules are any moiety which can be detected using an assay. Non-limiting examples of reporter molecules which have been conjugated to polypeptides include enzymes, radiolabels, haptens, fluorescent labels, phosphorescent molecules, chemiluminescent molecules, chromophores, luminescent molecules, photoaffinity molecules, colored particles or ligands, such as biotin. Detectable labels include compounds and/or elements that can be detected due to their specific functional properties, and/or chemical characteristics, the use of which allows the polypeptide to which they are attached to be detected, and/or further quantified if desired. Many appropriate detectable (imaging) agents are known in the art, as are methods for their attachment to polypeptides (see, for e.g., U.S. Pat. Nos. 5,021,236; 4,938,948; and 4,472,509, each incorporated herein by reference). The imaging moieties used can be paramagnetic ions; radioactive isotopes; fluorochromes; NMR-detectable substances; X-ray imaging. Molecules containing azido groups can also be used to form covalent bonds to proteins through reactive nitrene intermediates that are generated by low intensity ultraviolet light (Potter & Haley, 1983). In particular, 2- and 8-azido analogues of purine nucleotides have been used as site-directed photoprobes to identify nucleotide binding proteins in crude cell extracts (Owens & Haley, 1987; Atherton et al., 1985). The 2- and 8-azido nucleotides have also been used to map nucleotide binding domains of purified proteins (Khatoon et al., 1989; King et al., 1989; and Dholakia et al., 1989) and can be used as polypeptide binding agents.

[0129] In one embodiment, provided herein are fusion proteins containing modified versions of a DAB₃₈₉IL-2 where one or more VLS motifs have been modified as described herein.

### IV. Nucleic Acids, Vectors and Host Cells

[0130] Another aspect of the present invention pertains to vectors containing a polynucleotide (nucleic acid, DNA) encoding a modified DT variant or a fusion protein thereof.

[0131] The nucleotide and polypeptide sequences for various genes have been previously disclosed, and can be found at computerized databases known to those of ordinary skill in the art. One such database is the National Center for Biotechnology Information's Genbank and GenPept databases. The coding regions for these known genes can be amplified and/or expressed using the techniques disclosed herein or by any technique that would be know to those of ordinary skill in the art. Additionally, polypeptide sequences can be synthesized by methods known to those of ordinary skill in the art, such as polypeptide synthesis using automated polypeptide synthesis machines, such as those available from Applied Biosystems (Foster City, Calif.).

[0132] As used herein, the term “expression vector or construct” means any type of genetic construct containing a nucleic acid coding for a gene product in which part or all of the nucleic acid encoding sequence is capable of being transcribed. The transcript can be translated into a protein, but it need not be. Thus, in certain embodiments, expression includes both transcription of a gene and translation of a RNA into a gene product. In other embodiments, expression only includes transcription of the nucleic acid, for example, to generate antisense constructs.

[0133] Particularly useful vectors are contemplated to be those vectors in which the coding portion of the DNA segment, whether encoding a full length protein, polypeptide or smaller peptide, is positioned under the transcriptional control of a promoter. A “promoter” refers to a DNA sequence recognized by the synthetic machinery of the cell, or introduced synthetic machinery, required to initiate the specific transcription of a gene. The phrases “operatively positioned,” “under control” or “under transcriptional control” means that the promoter is in the correct location and orientation in relation to the nucleic acid coding for the gene product to control RNA polymerase initiation and expression of the gene.

[0134] The promoter can be in the form of the promoter that is naturally associated with a gene, as can be obtained by isolating the 5′ non-coding sequences located upstream of the coding segment or exon, for example, using recombinant cloning and/or PCR technology, in connection with the compositions disclosed herein.

[0135] In other embodiments, it is contemplated that certain advantages will be gained by positioning the coding DNA segment under the control of a recombinant, or heterologous, promoter. As used herein, a recombinant or heterologous promoter is intended to refer to a promoter that is not normally associated with a gene in its natural environment. Such promoters can include promoters normally associated with other genes, and/or promoters isolated from any other bacterial, viral, eukaryotic, or mammalian cell, and/or promoters made by the hand of man that are not “naturally occurring,” that is, containing difference elements from different promoters, or mutations that increase, decrease or alter expression.

[0136] Promoters that effectively direct the expression of the DNA segment in the cell type, organism, or even animal, are chosen for expression. The use of promoter and cell type combinations for protein expression is generally known to those of skill in the art of molecular biology, for example, see Sambrook et al., (1989), incorporated herein by reference. The promoters employed can be constitutive, or inducible, and can be used under the appropriate conditions to direct high level expression of the introduced DNA segment, such as is advantageous in the large-scale production of recombinant proteins or peptides.

[0137] At least one module in a promoter generally functions to position the start site for RNA synthesis. The best known example of this is the TATA box, but in some promoters lacking a TATA box, such as the promoter for the mammalian terminal deoxynucleotidyl transferase gene and the promoter for the SV40 late genes, a discrete element overlying the start site itself helps to fix the place of initiation.

[0138] Additional promoter elements regulate the frequency of transcriptional initiation. Typically, these are located in the region 30-110 base pairs (bp) upstream of the start site, although a number of promoters have been shown to contain functional elements downstream of the start site as well. The spacing between promoter elements frequently is flexible, so that promoter function is preserved when elements are inverted or moved relative to one another. In the tk promoter, the spacing between promoter elements can be increased to 50 bp apart before activity begins to decline. Depending on the promoter, it appears that individual elements can function either co-operatively or independently to activate transcription.

[0139] The particular promoter that is employed to control the expression of a nucleic acid is not believed to be critical, so long as it is capable of expressing the nucleic acid in the targeted cell. Thus, where a human cell is targeted, it is preferable to position the nucleic acid coding region adjacent to and under the control of a promoter that is capable of being expressed in a human cell. Generally speaking, such a promoter might include either a human or viral promoter.

[0140] In expression, one will typically include a polyadenylation signal to effect proper polyadenylation of the transcript. The nature of the polyadenylation signal is not believed to be crucial to the successful practice of the invention, and any such sequence may be employed. Polyadenylation signals include, but are not limited to the SV40 polyadenylation signal and the bovine growth hormone polyadenylation signal, convenient and known to function well in various target cells. Also contemplated as an element of the expression cassette is a terminator sequence. These elements can serve to enhance message levels and to minimize read through from the cassette into other sequences.

[0141] A specific initiation signal also can be required for efficient translation of coding sequences. These signals include the ATG initiation codon and adjacent sequences. Exogenous translational control signals, including the ATG initiation codon, may need to be provided. One of ordinary skill in the art would readily be capable of determining this and providing the necessary signals. It is well known that the initiation codon must be “in-frame” with the reading frame of the desired coding sequence to ensure translation of the entire insert. The exogenous translational control signals and initiation codons can be either natural or synthetic. The efficiency of expression may be enhanced by the inclusion of appropriate transcription enhancer elements.

[0142] It is contemplated that polypeptides can be co-expressed with other selected proteins, wherein the proteins can be co-expressed in the same cell or a gene(s) can be provided to a cell that already has another selected protein. Co-expression can be achieved by co-transfecting the cell with two distinct recombinant vectors, each bearing a copy of either of the respective DNA. Alternatively, a single recombinant vector can be constructed to include the coding regions for both of the proteins, which could then be expressed in cells transfected with the single vector. In either event, the term “co-expression” herein refers to the expression of both the gene(s) and the other selected protein in the same recombinant cell.

[0143] As used herein, the terms “engineered” and “recombinant” cells or host cells are intended to refer to a cell into which an exogenous DNA segment or gene, such as a cDNA or gene encoding a protein has been introduced. Therefore, engineered cells are distinguishable from naturally occurring cells which do not contain a recombinantly introduced exogenous DNA segment or gene. Engineered cells are thus cells having a gene or genes introduced through the hand of man. Recombinant cells include those having an introduced cDNA or genomic gene, and also include genes positioned adjacent to a promoter not naturally associated with the particular introduced gene.

[0144] To express a recombinant polypeptide, whether modified or wild-type, in accordance with the present invention one would prepare an expression vector that comprises a wild-type, or modified protein-encoding nucleic acid under the control of one or more promoters. To bring a coding sequence “under the control of” a promoter, one positions the 5′ end of the transcription initiation site of the transcriptional reading frame generally between about 1 and about 50 nucleotides “downstream” of (i.e., 3′ of) the chosen promoter. The “upstream” promoter stimulates transcription of the DNA and promotes expression of the encoded recombinant protein. This is the meaning of “recombinant expression” in this context.

[0145] Many standard techniques are available to construct expression vectors containing the appropriate nucleic acids and transcriptional/translational control sequences in order to achieve protein, polypeptide or peptide expression in a variety of host-expression systems. Cell types available for expression include, but are not limited to, bacteria, such as E. coli and B. subtilis transformed with recombinant bacteriophage DNA, plasmid DNA or cosmid DNA expression vectors.

[0146] Certain examples of prokaryotic hosts are E. coli strain RR1, E. coli LE392, E. coli B, E. coli X 1776 (ATCC No. 31537) as well as E. coli W3110 (F-, lambda-, prototrophic, ATCC No. 273325); bacilli such as Bacillus subtilis; and other enterobacteriaceae such as Salmonella typhimurium, Serratia marcescens, and various Pseudomonas species.

[0147] In general, plasmid vectors containing replicon and control sequences which are derived from species compatible with the host cell are used in connection with these hosts. The vector ordinarily carries a replication site, as well as marking sequences which are capable of providing phenotypic selection in transformed cells. For example, E. coli is often transformed using derivatives of pBR322, a plasmid derived from an E. coli species. pBR322 contains genes for ampicillin and tetracycline resistance and thus provides easy means for identifying transformed cells. The pBR plasmid, or other microbial plasmid or phage must also contain, or be modified to contain, promoters which can be used by the microbial organism for expression of its own proteins.

[0148] In addition, phage vectors containing replicon and control sequences that are compatible with the host microorganism can be used as transforming vectors in connection with these hosts. For example, the phage lambda GEM™-11 may be utilized in making a recombinant phage vector which can be used to transform host cells, such as E. coli LE392.

[0149] Further useful vectors include pIN vectors (Inouye et al., 1985); and pGEX vectors, for use in generating glutathione S-transferase (GST) soluble fusion proteins for later purification and separation or cleavage. Other suitable fusion proteins are those with β-galactosidase, ubiquitin, and the like.

[0150] Promoters that are most commonly used in recombinant DNA construction include the β-lactamase (penicillinase), lactose and tryptophan (trp) promoter systems. While these are the most commonly used, other microbial promoters have been discovered and utilized, and details concerning their nucleotide sequences have been published, enabling those of skill in the art to ligate them functionally with plasmid vectors.

[0151] The following details concerning recombinant protein production in bacterial cells, such as E. coli, are provided by way of exemplary information on recombinant protein production in general, the adaptation of which to a particular recombinant expression system will be known to those of skill in the art.

[0152] Bacterial cells, for example, E. coli, containing the expression vector are grown in any of a number of suitable media, for example, LB. The expression of the recombinant protein may be induced, e.g., by adding IPTG to the media or by switching incubation to a higher temperature. After culturing the bacteria for a further period, generally of between 2 and 24 hours (h), the cells are collected by centrifugation and washed to remove residual media.

[0153] The bacterial cells are then lysed, for example, by disruption in a cell homogenizer and centrifuged to separate the dense inclusion bodies and cell membranes from the soluble cell components. This centrifugation can be performed under conditions whereby the dense inclusion bodies are selectively enriched by incorporation of sugars, such as sucrose, into the buffer and centrifugation at a selective speed.

[0154] If the recombinant protein is expressed in the inclusion bodies, as is the case in many instances, these can be washed in any of several solutions to remove some of the contaminating host proteins, then solubilized in solutions containing high concentrations of urea (e.g., 8 M) or chaotropic agents such as guanidine hydrochloride in the presence of reducing agents, such as β-mercaptoethanol or DTT (dithiothreitol).

[0155] It is contemplated that the polypeptides produced by the methods described herein can be overexpressed, i.e., expressed in increased levels relative to its natural expression in cells. Such overexpression can be assessed by a variety of methods, including radio-labeling and/or protein purification. However, simple and direct methods are preferred, for example, those involving SDS/PAGE and protein staining or western blotting, followed by quantitative analyses, such as densitometric scanning of the resultant gel or blot. A specific increase in the level of the recombinant protein, polypeptide or peptide in comparison to the level in natural cells is indicative of overexpression, as is a relative abundance of the specific polypeptides in relation to the other proteins produced by the host cell and, e.g., visible on a gel.

[0156] Expression vectors provided herein comprise a polynucleotide encoding modified DT or a fusion protein thereof in a form suitable for expression of the polynucleotide in a host cell. The expression vectors generally have one or more regulatory sequences, selected on the basis of the host cells to be used for expression, which is operatively linked to the polynucleotide sequence to be expressed. It wilt be appreciated by those skilled in the art that the design of the expression vector can depend on such factors as the choice of the host cell to be transformed, the level of expression of protein desired, and the like. The expression vectors described herein can be introduced into host cells to produce proteins, including fusion proteins, encoded by polynucleotides as described herein (e.g., a modified DT or a DT fusion protein, and the like).

[0157] Expression vectors can be designed for expression of a modified DT or a DT fusion protein in prokaryotic or eukaryotic cells. The presence of a single DT molecule inside a eukaryotic cell would kill the cell. Specifically, the toxin binds to EF-tu which is required for translation and ribosylation. Accordingly, DT can only be expressed in cells with modified EF-tu that is no longer recognized by DT (see, e.g., Liu et al., Protein Expr Purif, 30:262-274 (2003); Phan et al., J. Biol. Chem., 268(12):8665-8 (1993); Chen et al., Mol. Cell. Biol., 5(12):3357-60 (1985); Kohne et al., Somat Cell Mol. Genet., 11(5):421-31 (1985); Moehring et al., Mol. Cell. Biol., 4(4):642-50 (1984)). In addition, a modified DT or a fusion protein thereof can be expressed in bacterial cells such as E. coli (Bishai et al., J Bacteriol 169(11):5140-51 (1987)). Consideration is given to the expression and activity of the types and levels of host protease expression, and this is dependent upon the cleavage site present in the engineered DT toxophore. The innate expression host protease expression profile could negatively impact the yields of DT fusion toxin produced (Bishai et al., Supra (1987)). To the degree that this requisite cleavage site can be altered to modulate the cell selectivity of resultant fusion proteins, it is envisioned that such cleavage site mutants could be in VLS-modified toxophores (Gordon et al., Infect Immun, 63(1):82-7 (1995); Gordon et al., Infect Immun, 62(2):333-40 (1994); Vallera et al., J Natl. Cancer Inst., 94:597-606 (2002); Abi-Habib et al., Blood., 104(7):2143-8 (2004)). Alternatively, the expression vector can be transcribed and translated in vitro.

[0158] The present application further provides gene delivery vehicles for the delivery of polynucleotides to cells, tissue, or a mammal for expression. For example, a polynucleotide sequence of the present invention can be administered either locally or systemically in a gene delivery vehicle. These constructs can utilize viral or non-viral vector approaches in in vivo or ex vivo modality. Expression of such coding sequences can be induced using endogenous mammalian or heterologous promoters. Expression of the coding sequence in vivo can be either constitutive or regulated. The invention includes gene delivery vehicles capable of expressing the contemplated polynucleotides including viral vectors. For example, Qiao et al. developed a system employing PG13 packaging cells produce recombinant retroviruses carrying a DT fragment which kills cancer cell and provides a method for using DT as component a suicide vector. Qiao et al., J. Virol. 76(14):7343-8 (2002).

[0159] Expressed DT-mutants and DT-fusion proteins can be tested for their functional activity. Methods for testing DT activity are well-known in the art. For example, the VLS effect of DT-mutants and DT-fusion proteins can be tested in HUVECs as described in Example 2. The ribosyltransferase activity of DT variants or DT-fusion proteins can be tested by the ribosyltransferase assay described in Example 3. The cytotoxicity of DT variants or DT-fusion proteins can be tested as described in Example 4.

[0160] The present application also provides purified, and in preferred embodiments, substantially purified, polypeptides expressed using one or more of the methods described herein. The term “purified” as used herein, is intended to refer to a proteinaceous composition, isolatable from mammalian cells or recombinant host cells, wherein the at least one polypeptide is purified to any degree relative to its naturally-obtainable state, i.e., relative to its purity within a cellular extract. A purified polypeptide therefore also refers to a wild-type or modified polypeptide free from the environment in which it naturally occurs.

[0161] Where the term “substantially purified” is used, this will refer to a composition in which the specific polypeptide forms the major component of the composition, such as constituting about 50% of the proteins in the composition or more. In one embodiment, a substantially purified polypeptide will constitute more than about 60%, about 70%, about 80%, about 90%, about 95%, about 99% or even more of the polypeptides in the composition.

[0162] A polypeptide that is “purified to homogeneity,” as applied to the present invention, means that the polypeptide has a level of purity where the polypeptide is substantially free from other proteins and biological components. For example, a purified polypeptide will often be sufficiently free of other protein components so that degradative sequencing can be performed.

[0163] Various methods for quantifying the degree of purification of polypeptides will be known to those of skill in the art in light of the present disclosure. These include, for example, determining the specific protein activity of a fraction, or assessing the number of polypeptides within a fraction by gel electrophoresis.

[0164] To purify a desired polypeptide, a natural or recombinant composition comprising at least some specific polypeptides will be subjected to fractionation to remove various other components from the composition. In addition to those techniques described in detail herein below, various other techniques suitable for use in protein purification will be well known to those of skill in the art. These include, for example, precipitation with ammonium sulfate, PEG, antibodies and the like or by heat denaturation, followed by centrifugation; chromatography steps such as ion exchange, gel filtration, reverse phase, hydroxylapatite, lectin affinity and other affinity chromatography steps; isoelectric focusing; gel electrophoresis; and combinations of such and other techniques.

[0165] Another example is the purification of a specific fusion protein using a specific binding partner. Such purification methods are routine in the art. As the present invention provides DNA sequences for the specific proteins, any fusion protein purification method can now be practiced. This is exemplified by the generation of a specific protein-glutathione S-transferase fusion protein, expression in E. coli, and isolation to homogeneity using affinity chromatography on glutathione-agarose or the generation of a polyhistidine tag on the N- or C-terminus of the protein, and subsequent purification using Ni-affinity chromatography. However, given many DNA and proteins are known, or may be identified and amplified using the methods described herein, any purification method can now be employed.

[0166] There is no general requirement that the polypeptides always be provided in their most purified state. Indeed, it is contemplated that less substantially purified polypeptides which are nonetheless enriched in the desired protein compositions, relative to the natural state, will have utility in certain embodiments. Polypeptides exhibiting a lower degree of relative purification may have advantages in total recovery of protein product, or in maintaining the activity of an expressed protein.

[0167] Provided herein is a method for making a composition comprising: (a) constructing a vector comprising a polynucleotide which encodes a polypeptide having an amino acid sequence of SEQ ID NOS: 4-147 or a polypeptide having two or more of such modifications, and (b) causing said polypeptide to be expressed in a host cell comprising said vector. In one embodiment, a composition produced by such a method, wherein said composition has a reduced binding activity to human vascular endothelial cells (HUVEC) compared to a DT molecule having a sequence of SEQ ID NO: 2 or 149.

[0168] Provided herein is a method for making a modified diphtheria toxin having a reduced binding activity to human vascular endothelial cells (HUVEC) compared to an unmodified diphtheria toxin, said method comprising the step of: (a) constructing a vector comprising a nucleic acid sequence encoding a modified diphtheria toxin, said modified diphtheria toxin comprising a diphtheria toxin having an amino acid sequence as recited in SEQ ID NO: 2 or 149 with one or more amino acid modifications therein, wherein at least one amino acid modification is made within an (x)D(y) motif in a region selected from the group consisting of residues 7-9, 29-31 and 290-292 of SEQ ID NO: 2 or 149, and said modified diphtheria toxin has cytotoxicity comparable to an unmodified diphtheria toxin. In one embodiment, a modification at position (x) is a substitution of V or I by an amino acid residue selected from among F, C, M, T, W, Y, P, H, E, Q, D, N, K, R, and a modified or unusual amino acid from Table 1. In one embodiment, a modification at position D is a substitution of D by an amino acid residue selected from among I, V, L, F, C, M, A, G, T, W, Y, P, H, Q, N, K, R and a modified or unusual amino acid from Table 1. In another embodiment, a modification at position (y) is a substitution of S by an amino acid residue selected from among I, F, C, M, A, G, T, W, Y, P, H, E, Q, D, N, K, R and a modified or unusual amino acid from Table 1. In another embodiment, a modified diphtheria toxin has a combination of two, three or more modifications in one or more (x)D(y) motifs. The modified diphtheria toxin has cytotoxicity comparable to that of a diphtheria toxin having a sequence of SEQ ID NO: 2 or 149; and (b) causing said polypeptide to be expressed in a host cell comprising said vector. In one embodiment, a modified diphtheria toxin contains one or more modifications selected from among V7T, V7N, V7D, D8N, S9A, S9T, S9G, V29N, V29D, V29T, D30N, S31G, S31N, I290T, S292A, S292G and S292T. In one embodiment, a modified diphtheria toxin contains two modifications. Such modified diphtheria toxins can contain a combination of mutations such as, for example, V7N V29N, V7N V29T, V7N V29D, V7T V29N, V7T V29T or V7T V29D. In one embodiment, a modified diphtheria toxin contains three modifications. Such modified diphtheria toxins can contain a combination of mutations such as, for example, V7N V29N I290N, V7N V29N I290T, V7N V29N S292A, V7N V29N S292T, V7N V29T I290N, V7N V29T I290T, V7N V29T S292A, V7N V29T S292T, or V7T V29T I290T.

[0169] Unmodified diphtheria toxins can have, for example, an amino acid sequence of SEQ ID NO: 2, 149 or an amino acid sequence of any one of SEQ ID NOS: 4-147.

[0170] Bacterial and plant holotoxins often contain two disulfide-bonded chains, the A and B chains. The B chain carries both a cell-binding region (whose receptor is often uncharacterized) and a translocation region, which facilitates the insertion of the A chain through the membrane of an acid intracellular compartment into the cytosol. The A chain then kills the cell after translocation. For their use in vivo, the ligand and toxin are coupled in such a way as to remain stable while passing through the bloodstream and the tissues and yet be labile within the target cell so that the toxic portion can be released into the cytosol.

[0171] Diphtheria toxin as described herein comprises the amino acid sequence as set forth in SEQ ID NO: 2 or 149. Additionally, variants of diphtheria are known to contain nucleic acid residue insertions, deletions, and/or substitutions in their nucleic acid sequence while still retaining their biological activity. Variants of diphtheria toxin have been characterized demonstrating nucleic acid variation among diphtheria toxins. (Holmes, R. K., J. Infect. Dis., 181 (Supp. 1): S156-S167 (2000)), thus diphtheria toxins can comprise different nucleic acid and/or amino acid sequences. Nucleic acid residue insertions, deletions, and/or substitutions can also affect the amino acid sequence. However, not all nucleic acid residue changes will result in a change at the amino acid residue level of a protein due to the redundancy of the genetic code. Nucleic acid and/or amino acid variations (i.e., insertions, deletions, and/or substitutions) of diphtheria toxin are also included within the definition of diphtheria toxin and contemplated herein. As used herein, diphtheria toxin comprises the amino acid sequence as set forth in SEQ ID NO: 2 or 149 and further includes diphtheria toxins comprising amino acid sequences about 90%, 91%, 92%, 93%, 94%, 95%, 96%, 97%, 98%, or 99% homologous to SEQ ID NO: 2 or 149. C-terminal truncations of DT can also made and include for example, deletion of about 1, about 2, about 3, about 4, about 5, about 6, about 7, about 8, about 9, about 10, about 11, about 12, about 13, about 14, about 15, about 20, about 25, about 30, about 35, about 40, or about 50 amino acid residues of DT389 or DT387. For example, as used herein, diphtheria toxin comprises the amino acid sequence as set forth in amino acid residues 1-382 of SEQ ID NO: 2 or 149 and further includes diphtheria toxins comprising amino acid sequences about 90%, 91%, 92%, 93%, 94%, 95%, 96%, 97%, 98%, or 99% homologous to amino acid residues 1-382 of SEQ ID NO: 2 or 149. One would understand that variants of diphtheria toxin could be modified and tested for function using any of the methods described herein.

[0172] However, it may be desirable from a pharmacologic standpoint to employ the smallest molecule possible that nevertheless provides an appropriate biological response. One can, thus, desire to employ smaller A chain peptides which will provide an adequate anti-cellular response. To this end, DT can be “truncated” and still retain an adequate toxin activity. It is proposed that where desired, this truncated A chain can be employed in fusion proteins in accordance with the embodiments described herein.

[0173] Alternatively, one may find that the application of recombinant DNA technology to the toxin moiety may provide additional benefits. In that biologically active DT has now been cloned and recombinantly expressed, it is now possible to identify and prepare smaller or otherwise variant peptides which nevertheless exhibit an appropriate toxin activity. Moreover, the fact that DT has now been cloned allows the application of site-directed mutagenesis through which one can readily prepare and screen for DT A chain, toxin-derived peptides and obtain additional useful moieties for use in connection with the presently described compounds. Once identified, these moieties can be mutated to produce toxins exhibiting a reduced ability to promote VLS, EC damaging activity and/or other effects of such sequences described herein or known to one of skill in the art.

[0174] In one aspect, toxin as used herein contemplates fusion proteins between toxins (e.g., diphtheria toxin) and non-toxin polypeptides containing at least one cell binding domain. In one non-limiting example, a diphtheria toxin or a fragment thereof is fused to a cell-binding domain of interleukin-2 (IL-2), thus creating a fusion toxin. As described in further detail herein, fusion protein toxins can also comprise linker polypeptides and conjugates. Such toxins are also contemplated as toxins to be modified by the methods disclosed herein.

[0175] In one embodiment, a toxin is a fusion protein comprising a modified toxin wherein the toxin binding domain has been replaced with the binding domain of a non-toxin polypeptide. In another embodiment, the toxin is a fusion protein comprising a modified diphtheria toxin and a non-toxin polypeptide. In another embodiment, the toxin is a fusion protein comprising diphtheria toxin and IL-2.

[0176] Provided herein is a fusion protein comprising a modified diphtheria toxin made by such a method and a non-diphtheria toxin polypeptide.

[0177] In certain embodiments, the non-diphtheria toxin polypeptide is, for example, an antibody or antigen-binding fragment thereof, EGF, IL-1, IL-2, IL-3, IL-4, IL-5, IL-6, IL-7, IL-8, IL-9, IL-10, IL-11, IL-12, IL-13, IL-14, IL-15, INFα; INFγ, GM-CSF, G-CSF, M-CSF, TNF, VEGF, Ephrin, BFGF, TGF or a cell-binding portion thereof. In one embodiment, the non-diphtheria toxin polypeptide is IL-2 or a cell-specific binding portion thereof, or IL-3 or a cell-specific binding portion thereof.

[0178] In certain embodiments, the fusion protein or toxin further comprises at least another agent. Such an agent can be a molecule or moiety including, but not limited to, at least one effector (therapeutic moiety) or reporter molecule (a detectable label) as described elsewhere herein.

### V. Compositions and Therapeutic Uses

[0179] Each of the compounds described herein can be used as a composition when combined with an acceptable carrier or excipient. Such compositions are useful for in vitro analysis or for administration to a subject in vivo or ex vivo for treating a subject with the disclosed compounds.

[0180] Thus pharmaceutical compositions can comprise, in addition to active ingredient, a pharmaceutically acceptable excipient, carrier, buffer, stabilizer or other materials well known to those skilled in the art. Such materials should be non-toxic and should not interfere with the efficacy of the active ingredient. The precise nature of the carrier or other material will depend on the route of administration.

[0181] Pharmaceutical formulations comprising a protein of interest, e.g., an antibody, identified by the methods described herein can be prepared for storage by mixing the protein having the desired degree of purity with optional physiologically acceptable carriers, excipients or stabilizers (Remington's Pharmaceutical Sciences 16th edition, Osol, A. Ed. (1980)), in the form of lyophilized formulations or aqueous solutions. Acceptable carriers, excipients, or stabilizers are nontoxic to recipients at the dosages and concentrations employed, and include buffers such as phosphate, citrate, and other organic acids; antioxidants including ascorbic acid and methionine; preservatives (such as octadecyldimethylbenzyl ammonium chloride; hexamethonium chloride; benzalkonium chloride, benzethonium chloride; phenol, butyl or benzyl alcohol; alkyl parabens such as methyl or propyl paraben; catechol; resorcinol; cyclohexanol; 3-pentanol; and m-cresol); low molecular weight (less than about 10 residues) polypeptides; proteins, such as serum albumin, gelatin, or immunoglobulins; hydrophilic polymers such as polyvinylpyrrolidone; amino acids such as glycine, glutamine, asparagine, histidine, arginine, or lysine; monosaccharides, disaccharides, and other carbohydrates including glucose, mannose, or dextrins; chelating agents such as EDTA; sugars such as sucrose, mannitol, trehalose or sorbitol; salt-forming counter-ions such as sodium; metal complexes (e.g., Zn-protein complexes); and/or non-ionic surfactants such as TWEEN®, PLURONICS® or polyethylene glycol (PEG).

[0182] The formulation described herein can also contain more than one active compound as necessary for the particular indication being treated. Such molecules are suitably present in combination in amounts that are effective for the purpose intended.

[0183] Acceptable carriers are physiologically acceptable to the administered patient and retain the therapeutic properties of the compounds with/in which it is administered. Acceptable carriers and their formulations are and generally described in, for example, Remington' pharmaceutical Sciences (18th Edition, ed. A. Gennaro, Mack Publishing Co., Easton, Pa. 1990). One exemplary carrier is physiological saline. The phrase “pharmaceutically acceptable carrier” as used herein means a pharmaceutically acceptable material, composition or vehicle, such as a liquid or solid filler, diluent, excipient, solvent or encapsulating material, involved in carrying or transporting the subject compounds from the administration site of one organ, or portion of the body, to another organ, or portion of the body, or in an in vitro assay system. Each carrier must be “acceptable” in the sense of being compatible with the other ingredients of the formulation and not injurious to a subject to whom it is administered. Nor should an acceptable carrier alter the specific activity of the subject compounds. Exemplary carriers and excipients have been provided elsewhere herein.

[0184] In one aspect, provided herein are pharmaceutically acceptable or physiologically acceptable compositions including solvents (aqueous or non-aqueous), solutions, emulsions, dispersion media, coatings, isotonic and absorption promoting or delaying agents, compatible with pharmaceutical administration. Pharmaceutical compositions or pharmaceutical formulations therefore refer to a composition suitable for pharmaceutical use in a subject. The pharmaceutical compositions and formulations include an amount of a compound described herein, for example, an effective amount of modified DT fusion protein described herein, and a pharmaceutically or physiologically acceptable carrier.

[0185] Compositions can be formulated to be compatible with a particular route of administration, systemic or local. Thus, compositions include carriers, diluents, or excipients suitable for administration by various routes. Pharmaceutical compositions for oral administration may be in tablet, capsule, powder or liquid form. A tablet may comprise a solid carrier such as gelatin or an adjuvant. Liquid pharmaceutical compositions generally comprise a liquid carrier such as water, petroleum, animal or vegetable oils, mineral oil or synthetic oil. Physiological saline solution, dextrose or other saccharide solution or glycols such as ethylene glycol, propylene glycol or polyethylene glycol may be included.

[0186] In a further embodiment, the compositions can further comprise, if needed, an acceptable additive in order to improve the stability of the compounds in composition and/or to control the release rate of the composition. Acceptable additives do not alter the specific activity of the subject compounds. Exemplary acceptable additives include, but are not limited to, a sugar such as mannitol, sorbitol, glucose, xylitol, trehalose, sorbose, sucrose, galactose, dextran, dextrose, fructose, lactose and mixtures thereof. Acceptable additives can be combined with acceptable carriers and/or excipients such as dextrose. Alternatively, exemplary acceptable additives include, but are not limited to, a surfactant such as polysorbate 20 or polysorbate 80 to increase stability of the peptide and decrease gelling of the solution. The surfactant can be added to the composition in an amount of 0.01% to 5% of the solution. Addition of such acceptable additives increases the stability and half-life of the composition in storage.

[0187] The pharmaceutical composition can be delivered subcutaneously, intramuscularly, intraperitoneally, orally or intravenously. Aerosol delivery of the compositions is also contemplated herein using conventional methods. For example, intravenous delivery is now possible by cannula or direct injection or via ultrasound guided fine needle. Mishra (Mishra et al., Expert Opin. Biol., 3(7): 1173-1180 (2003)) provides for intratumoral injection.

[0188] Formulations or enteral (oral) administration can be contained in a tablet (coated or uncoated), capsule (hard or soft), microsphere, emulsion, powder, granule, crystal, suspension, syrup or elixir. Conventional non-toxic solid carriers which include, for example, pharmaceutical grades of mannitol, lactose, starch, magnesium stearate, sodium saccharin, talcum, cellulose, glucose, sucrose, magnesium carbonate, can be used to prepare solid formulations. Supplementary active compounds (e.g., preservatives, antibacterial, antiviral and antifungal agents) can also be incorporated into the formulations. A liquid formulation can also be used for enteral administration. The carrier can be selected from various oils including petroleum, animal, vegetable or synthetic, for example, peanut oil, soybean oil, mineral oil, sesame oil. Suitable pharmaceutical excipients include e.g., starch, cellulose, talc, glucose, lactose, sucrose, gelatin, malt, rice, flour, chalk, silica gel, magnesium stearate, sodium stearate, glycerol monostearate, sodium chloride, dried skim milk, glycerol, propylene glycol, water, ethanol.

[0189] Compositions for injection include aqueous solutions (where water soluble) or dispersions and sterile powders for the extemporaneous preparation of sterile injectable solutions or dispersions. For intravenous administration, suitable carriers include physiological saline, bacteriostatic water, Cremophor EL™ (BASF, Parsippany, N.J.) or phosphate buffered saline (PBS). The carrier can be a solvent or dispersion medium containing, for example, water, ethanol, polyol (for example, glycerol, propylene glycol, and liquid polyetheylene glycol, and the like), and suitable mixtures thereof. Fluidity can be maintained, for example, by the use of a coating such as lecithin, by the maintenance of the required particle size in the case of dispersion and by the use of surfactants. Antibacterial and antifungal agents include, for example, parabens, chlorobutanol, phenol, ascorbic acid and thimerosal. Isotonic agents, for example, sugars, polyalcohols such as manitol, sorbitol, and sodium chloride may be included in the composition. The resulting solutions can be packaged for use as is, or lyophilized; the lyophilized preparation can later be combined with a sterile solution prior to administration.

[0190] Compositions can be conventionally administered intravenously, such as by injection of a unit dose, for example. For injection, an active ingredient can be in the form of a parenterally acceptable aqueous solution which is substantially pyrogen-free and has suitable pH, isotonicity and stability. One can prepare suitable solutions using, for example, isotonic vehicles such as Sodium Chloride Injection, Ringer's Injection, Lactated Ringer's Injection. Preservatives, stabilizers, buffers, antioxidants and/or other additives may be included, as required.

[0191] In one embodiment, the composition is lyophilized and reconstituted prior to administration to increase shelf-life of the compound. When the compositions are considered for medicaments, or use in any of the methods provided herein, it is contemplated that the composition can be substantially free of pyrogens such that the composition will not cause an inflammatory reaction or an unsafe allergic reaction.

[0192] Acceptable carriers can contain a compound that stabilizes, increases or delays absorption or clearance. Such compounds include, for example, carbohydrates, such as glucose, sucrose, or dextrans; low molecular weight proteins; compositions that reduce the clearance or hydrolysis of peptides; or excipients or other stabilizers and/or buffers. Agents that delay absorption include, for example, aluminum monostearate and gelatin. Detergents can also be used to stabilize or to increase or decrease the absorption of the pharmaceutical composition, including liposomal carriers. To protect from digestion the compound can be complexed with a composition to render it resistant to acidic and enzymatic hydrolysis, or the compound can be complexed in an appropriately resistant carrier such as a liposome. Means of protecting compounds from digestion are known in the art (see, e.g., Fix (1996) Pharm Res. 13:1760 1764; Samanen (1996) J. Pharm. Pharmacol. 48:119 135; and U.S. Pat. No. 5,391,377, describing lipid compositions for oral delivery of therapeutic agents).

[0193] For intravenous, injection, or injection at the site of affliction, the active ingredient will be in the form of a parenterally acceptable aqueous solution which is pyrogen-free and has suitable pH, isotonicity and stability. Those of relevant skill in the art are well able to prepare suitable solutions using, for example, isotonic vehicles such as Sodium Chloride Injection, Ringer's Injection, Lactated Ringer's Injection. Preservatives, stabilizers, buffers, antioxidants and/or other additives may be included, as needed.

[0194] The phrase “pharmaceutically acceptable” refers to molecular entities and compositions that are physiologically tolerable and do not typically produce an allergic or similar untoward reaction, such as gastric upset, dizziness and the like, when administered to a human.

[0195] The term “unit dose” when used in reference to a therapeutic composition refers to physically discrete units suitable as unitary dosage for humans, each unit containing a predetermined quantity of active material calculated to produce the desired therapeutic effect in association with the required diluent; i.e., carrier, or vehicle.

[0196] The compositions can be administered in a manner compatible with the dosage formulation, and in a therapeutically effective amount. The quantity to be administered depends on the subject to be treated, capacity of the subject's immune system to utilize the active ingredient, and degree of binding capacity desired. Precise amounts of active ingredient required to be administered depend on the judgment of the practitioner and are peculiar to each individual. Suitable regimes for initial administration and booster shots are also variable, but are typified by an initial administration followed by repeated doses at one or more hour intervals by a subsequent injection or other administration. Alternatively, continuous intravenous infusion sufficient to maintain concentrations of ten nanomolar to ten micromolar in the blood are contemplated.

[0197] A “therapeutically effective amount” as used herein, is an amount that achieves at least partially a desired therapeutic or prophylactic effect in an organ or tissue. The amount of a modified DT necessary to bring about prevention and/or therapeutic treatment of the disease is not fixed per se. The amount of VLS modified DT fusion toxin administered will vary with the type of disease, extent of the disease, and size of species of the mammal suffering from the disease. Generally, amounts will be in the range of those used for other cytotoxic agents used in the treatment of cancer, although in certain instances lower amounts will be needed because of the specificity and increased toxicity of the VLS-modified DT fusion toxins. In certain circumstances, and as can be achieved by, currently available techniques (for example, cannulae or convection enhanced delivery, selective release), attempts to deliver enhanced locally elevated fusion toxin amounts to specific sites may also be desired. (Laske et al., J. Neurosurg., 87:586-5941(997); Laske et al., Nature Medicine, 3:1362-1368 (1997), Rand et al., Clin. Cancer Res., 6:2157-2165 (2000); Engebraaten et al., J. Cancer, 97:846-852 (2002), Prados et al., Proc. ASCO, 21:69b (2002), Pickering et al., J Clin Invest, 91(2):724-9 (1993)).

[0198] One embodiment contemplates the use of the compositions described herein to make a medicament for treating a condition, disease or disorder described herein. Medicaments can be formulated based on the physical characteristics of the patient/subject needing treatment, and can be formulated in single or multiple formulations based on the stage of the condition, disease or disorder. Medicaments can be packaged in a suitable package with appropriate labels for the distribution to hospitals and clinics wherein the label is for the indication of treating a subject having a disease described herein. Medicaments can be packaged as a single or multiple units. Instructions for the dosage and administration of the compositions can be included with the packages as described below.

[0199] The invention is further directed to pharmaceutical compositions comprising a modified DT or fusion protein thereof described hereinabove and a pharmaceutically acceptable carrier.

[0200] Sterile injectable solutions can be prepared by incorporating an active ingredient in the required amount in an appropriate solvent with one or a combination of ingredients enumerated above, as required, followed by filtered sterilization. Generally, dispersions are prepared by incorporating the active ingredient into a sterile vehicle which contains a basic dispersion medium and the required other ingredients from those enumerated above. In the case of sterile powders for the preparation of sterile injectable solutions, the methods of preparation are those such as vacuum drying and freeze drying which yields a powder of the active ingredient plus any additional desired ingredient from a previously sterile-filtered solution thereof.

[0201] In certain embodiments is the further purification of this mixture to obtain preparations essentially comprising fusion proteins. This purification is accomplished by further chromatographic separation which can be accomplished by affinity chromatography for example, using a salt gradient to elute the various species of immunotoxins and gel filtration to separate the immunotoxins from larger molecules.

[0202] A gel to be used in purification of compounds described herein is a three dimensional network which has a random structure. Molecular sieve gels are those cross-linked polymers that do not bind or react with the material being analyzed or separated. For gel filtration purposes, a gel material is generally uncharged. The space within the gel is filled with liquid and the liquid phase constitutes the majority of the gel volume. Materials commonly used in gel filtration columns include dextran, agarose and polyacrylamide.

[0203] Dextran is a polysaccharide composed of glucose residues and is commercially available under the name SEPHADEX (Pharmacia Fine Chemicals, Inc.). The beads are prepared with various degrees of cross-linking in order to separate different sized molecules by providing various pore sizes. Alkyl dextran is cross-linked with N,N′-methylenebisacrylamide to form SEPHACRYL-S100 to S1000 which allows strong beads to be made that fractionate in larger ranges than SEPHADEX can achieve.

[0204] Polyacrylamide can also be used as a gel filtration medium. Polyacrylamide is a polymer of cross-linked acrylamide prepared with N,N′-methylenebisacrylamide as the cross-linking agent. Polyacrylamide is available in a variety of pore sizes from Bio-Rad Laboratories (USA) to be used for separation of different size particles.

[0205] The gel material swells in water and in a few organic solvents. Swelling is the process by which the pores become filled with liquid to be used as eluant. As the smaller molecules enter the pores, their progress through the gel is retarded relative to the larger molecules which do not enter the pores, forming the basis of the separation. The beads are available in various degrees of fineness to be used in different applications. The coarser the bead, the faster the flow and the poorer the resolution. Superfine can be used for maximum resolution, but the flow is very slow. Fine is used for preparative work in large columns which require a faster flow rate. The coarser grades are for large preparations in which resolution is less important than time, or for separation of molecules with a large difference in molecular weights.

[0206] Affinity chromatography is generally based on the recognition of a protein by a substance such as a ligand or an antibody. The column material can be synthesized by covalently coupling a binding molecule, such as an activated dye, for example to an insoluble matrix. The column material is then allowed to adsorb the desired substance from solution. Next, the conditions are changed to those under which binding does not occur and the substrate is eluted. The requirements for successful affinity chromatography are that the matrix must adsorb molecules, the ligand must be coupled without altering its binding activity, a ligand must be chosen whose binding is sufficiently tight, and it must be possible to elute the substance without destroying it.

[0207] One embodiment of the compounds described herein is an affinity chromatography method where the matrix is a reactive dye-agarose matrix. Blue-SEPHAROSE, a column matrix composed of Cibacron Blue 3GA and agarose or SEPHAROSE can be used as the affinity chromatography matrix. Alternatively, SEPHAROSE CL-6B is available as Reactive Blue 2 from Sigma Chemical Company. This matrix binds fusion proteins directly and allows their separation by elution with a salt gradient.

[0208] Provided herein are compositions containing modified diphtheria toxins, said modified diphtheria toxin comprising an amino acid sequence as set forth in, for example, SEQ ID NO: 2 or 149 with one or more amino acid modifications therein, wherein at least one amino acid modification is made within an (x)D(y) motif in a region selected from among residues 7-9, 29-31 and 290-292 of SEQ ID NO: 2 or 149, and said modified diphtheria toxin has cytotoxicity comparable to an unmodified diphtheria toxin. In one embodiment, a modification at position (x) is a substitution of V or I by an amino acid residue selected from among F, C, M, T, W, Y, P, H, E, Q, D, N, K, R, and a modified or unusual amino acid from Table 1. In one embodiment, a modification at position D is a substitution of D by an amino acid residue selected from among I, V, L, F, C, M, A, G, T, W, Y, P, H, Q, N, K, R and a modified or unusual amino acid from Table 1. In another embodiment, a modification at position (y) is a substitution of S by an amino acid residue selected from among I, F, C, M, A, G, T, W, Y, P, H, E, Q, D, N, K, R and a modified or unusual amino acid from Table 1. In another embodiment, a modified diphtheria toxin has a combination of two, three or more modifications in one or more (x)D(y) motifs. In one embodiment, a modified diphtheria toxin contains one or more modifications selected from among V7T, V7N, V7D, D8N, S9A, S9T, S9G, V29N, V29D, V29T, D30N, S31G, S31N, I290T, S292A, S292G and S292T. In one embodiment, a modified diphtheria toxin contains two modifications. Such modified diphtheria toxins can contain a combination of mutations such as, for example, V7N V29N, V7N V29T, V7N V29D, V7T V29N, V7T V29T or V7T V29D. In one embodiment, a modified diphtheria toxin contains three modifications. Such modified diphtheria toxins can contain a combination of mutations such as, for example, V7N V29N I290N, V7N V29N I290T, V7N V29N S292A, V7N V29N S292T, V7N V29T I290N, V7N V29T I290T, V7N V29T S292A, V7N V29T S292T, or V7T V29T I290T.

[0209] Unmodified diphtheria toxins can have, for example, an amino acid sequence of SEQ ID NO: 2 or 149 or an amino acid sequence of any one of SEQ ID NOS: 4-147.

[0210] Compositions comprising modified diphtheria toxins, said have reduced binding activity to human vascular endothelial cells (HUVECs) compared to an unmodified diphtheria toxin. Such compositions can further comprise a non-diphtheria toxin polypeptide including, but not limited to, an antibody or an antigen-binding fragment thereof, EGF, IL-1, IL-2, IL-3, IL-4, IL-5, IL-6, IL-7, IL-8, IL-9, IL-10, IL-11, IL-12, IL-13, IL-14, IL-15, INFα, INFγ, GM-CSF, G-CSF, M-CSF, TNF, VEGF, Ephrin, BFGF or, TGF. The non-diphtheria toxin polypeptide can also be a fragment of such polypeptides, such as a cell-specific binding portion thereof. In one embodiment, the non-diphtheria toxin polypeptide is IL-2 or a cell-specific binding portion thereof, or IL-3 or a cell-specific binding portion thereof.

[0211] Modified DT and fusion proteins thereof having reduced binding to HUVECs while maintaining the cytotoxicity can be used for the treatment of various lymphoid-derived malignancies (e.g., cancers), solid tumors and non-malignant diseases such as GVHD or psoriasis.

[0212] In an exemplary embodiment, the VLS modified DT fusion toxins of the invention are administered to a subject such as a mammal (e.g., a human), suffering from a medical disorder, e.g., a cancer such as a T cell lymphoma, or non-malignant conditions characterized by the presence of a class of unwanted cells to which a targeting ligand can selectively bind (e.g., GVHD).

[0213] Denileukin diftitox has been shown to be effective in treating a subject having previously been treated for cutaneous T-cell lymphoma (Chin and Foss (2006) Clinical Lymphoma and Myeloma, 7(3): 199-204; Talpur et al. (2006) J. Investigative Dermatology 126: 575-583). Briefly, denileukin diftitox was administered intravenously for 3 or 5 consecutive days at a dose of 4 μg/kg/day, 9 μg/kg/day or 18 μg/kg/day for 3-21 cycles. An overall response rate of 51% was observed. Denileukin diftitox has been approved by the FDA for treatment of cutaneous T cell lymphoma in the United States.

[0214] Provided herein is a method of treating a subject having cutaneous T-cell lymphoma by administering a modified DT fusion protein as described herein

[0215] Denileukin diftitox has been shown to be effective in treating subjects having relapsed/refractory T-cell and B-cell non-Hodgkin lymphoma (Dang et al. (2006) Br. J. Haematology 136: 439-447; Dang et al. (2004) J. Clin. Oncol. 22: 4095-4102). Briefly, eligible patients received denileukin diftitox 18 μg/kg/day for 5 days every three weeks for up to eight cycles. Such a regimen was well tolerated in patients and was effective in treating relapsed/refractory T-cell and B-cell non-Hodgkin lymphoma.

[0216] Provided herein is a method of treating a subject having relapsed/refractory T-cell or B-cell non-Hodgkin lymphoma by administering a modified DT fusion protein as described herein.

[0217] In a Phase II clinical study, it was shown that ONTAK.® in combination with rituximab was significantly effective in treating patients having relapsed/refractory B-cell non-Hodgkin lymphoma. Therefore, provided herein is a method of treating a subject having relapsed/refractory B-cell non-Hodgkin lymphoma by administering a modified DT fusion protein as described herein.

[0218] Denileukin diftitox has been shown to be effective in treating a subject having panniculitic T-cell lymphoma (McGinnis et al. (2002) Arch. Dermatol. 138: 740-742). Briefly, a female patient previously treated with bexarotene and interferon alpha relapsed within 2 months of therapy. The patient was then treated with 1 cycle of intravenous denileukin diftitox (9 μg/kg/day for 5 days). Clinical remission was observed with resolution of all cutaneous disease, and constitutional symptoms was achieved 2 weeks after the completion of the third cycle of denileukin diftitox.

[0219] Provided herein is a method of treating a subject having panniculitic T-cell lymphoma by administering a modified DT fusion protein as described herein. In one non-limiting embodiment, if needed, the subject can be treated in combination with one or more other therapies, such as, for example, bexarotene and/or interferon alpha.

[0220] Denileukin diftitox has been shown to be effective in treating a subject having extranodal natural killer/T cell lymphoma, nasal type (Kerl et al. (2006) Br. J. Dermatology, 154: 988-991). Briefly, a 58-year old male with rapidly progressive Epstein-Barr virus-positive nasal type extranodal natural killer/T cell lymphoma was treated with a combination of bexarotene and denileukin diftitox. A significant regression of the cutaneous tumors was observed after a first cycle of denileukin diftitox and was maintained for a period of 5 months with monthly cycles of denileukin diftitox.

[0221] Provided herein is a method of treating a subject having extranodal natural killer/T cell lymphoma, nasal type by administering a modified DT fusion protein as described herein in combination with bexarotene.

[0222] Denileukin diftitox has been shown to be effective in treating a subject having previously treated chronic lymphocytic leukemia (Frankel et al. (2006) Cancer, 106(10): 2158-2164). Briefly, denileukin diftitox was administered as a 60-minute intravenous infusion for 5 days every 21 days at a dose of 18 μg/kg/day for up to 8 cycles. Overall, patients exhibited reduction of peripheral chronic lymphocytic leukemia (CLL) cells, reductions in lymph node size, and in some cases, remission as identified over time from bone marrow biopsies. In one instance, a patient treated was chemorefractory against fludarabine (Morgan et al. (2004) Clin. Cancer Res. 9(10 Pt 1): 3555-3561).

[0223] Provided herein is a method of treating a subject having chronic lymphocytic leukemia by administering a modified DT fusion protein as described herein.

[0224] Denileukin diftitox has been shown to be effective in treating a subject having human T-cell lymphotrophic virus 1-associated acute T cell leukemia/lymphoma (Venuti et al. (2003) Clin. Lymphoma 4(3): 176-180). Briefly, 4 cycles of denileukin diftitox was administered which resulted in restoration of normal hematopiesis and a reduction in bone marrow myelofibrosis. Following disease progression, 4 cycles of hyper-CVAD (hyperfractionated cyclophosphamide/doxorubicin/vincristine/decadron) were administered and complete clinical remission was achieved. The patient received maintenance therapy with denileukin diftitox for 1 year.

[0225] Provided herein is a method of treating a subject having human T-cell lymphotrophic virus 1-associated acute T cell leukemia/lymphoma by administering a modified DT fusion protein as described herein in combination with hyper-CVAD therapy.

[0226] Denileukin diftitox has been shown to be effective in treating a subject having a solid tumor (Eklund and Kuzel. Expert Rev. Anticancer Ther., 2005 February; 5(1):33-8). Therefore, provided herein is a method of treating a subject having one or more solid tumors by administering a modified DT fusion protein as described herein. Exemplary solid tumors include, but are not limited to, those of a tissue or organ selected from among skin, melanoma, lung, pancreas, breast, ovary, colon, rectum, stomach, thyroid, laryngeal, ovary, prostate, colorectal, head, neck, eye, mouth, throat, esophagus, chest, bone, testicular, lymph, marrow, bone, sarcoma, renal, sweat gland, liver, kidney, brain, gastrointestinal tract, nasopharynx, genito-urinary tract, muscle, and the like tissues.

[0227] Acute Graft-versus Host Disease (aGVHD) is mediated partly through activated T cells which express the high affinity receptor for IL-2, which is recognized by denileukin diftitox. In a phase II study of patients suffering from steroid-resistant aGVHD, one group of patients were treated with a dose regimen of 4.5 μg/kg daily on days 1-5 and then weekly on study days 8, 15, 22 and 29. Another group of patients were treated at with a dose regimen of 9 μg/kg on the same schedule. Responses were assessed at days 36 and 100.41% of the patients responded, all with a complete response at day 36 and 27% patients responding at day 100 (4 complete responses and 2 partial responses).

[0228] Provided herein is a method of treating a subject having aGVHD by administering a modified DT fusion protein as described herein.

[0229] Psoriasis is an immune-mediated skin disease in which T-cells are chronically stimulated by antigen-presenting cells in the skin. Psoriasis is a chronic relapsing disease that requires intermittent treatment. Denileukin diftitox was shown to effectively target activated T cells and improved psoriasis; however, a side effect of the treatment was vascular leak syndrome (Walsh and Shear. (2004) CMAJ, 170(13): 1933-1941). In a phase II study of patients suffering from severe psoriasis, 35 patients were treated with one of three doses of ONTAK® (0.5, 1.5 or 5 μg/kg/day) and received three doses per week for eight weeks. Eight out of 15 patients (treated with 5 or 1.5 μg/kg/day) showed more than 50% decrease in symptoms as measured by the Psoriasis Area and Severity Index (PASI) and Physician's Global Assessment (PGA). Four patients, all treated with a dose of 5 μg/kg/day, benefited from a 2-grade improvement on the 5-grade PGA scale.

[0230] Provided herein is a method of treating a subject having psoriasis by administering a modified DT fusion protein as described herein.

[0231] Also contemplated herein is a method of providing maintenance therapy by administering a non-immunogenic DT fusion protein as described herein.

[0232] As described by Dannull et al. (J. Clin. Invest. 115(12): 3623-3633 (2005)), immunization with RNA-transfected dendritic cells (DCs) is an effective strategy to stimulate potent T cell responses in patients with metastatic cancers (Su et al. 2003. Cancer Res. 63: 3127-2133; Heiser et al. 2002. J. Clin. Invest. 109: 409-417). CD4+ T cells constitutively expressing the IL-2 receptor α-chain (CD25) act in a regulatory capacity by suppressing the activation and function, of other T cells (Shevach, E. M. 2001. J. Exp. Med. 193: F41-F46). Their physiological role is to protect the host against the development of autoimmunity by regulating immune responses against antigens expressed by normal tissues (Jonuleit et al. 2000. J. Exp. Med. 192: 1213-1222; Read and Powrie. 2001. Curr. Opin. Immunol. 13: 644-649). Since tumor antigens are largely self antigens, T regulatory cells (Tregs) may also prevent the tumor-bearing host from mounting an effective anti-tumor immune response. Previous studies have shown that elevated numbers of CD4+CD25+ Tregs can be found in advanced cancer patients (Woo et al. 2002. J. Immunol. 168: 4272-4276) and that high Treg frequencies are associated with reduced survival (Curiel et al. 2004. Nat. Med. 10: 942-949). The important role of CD4+CD25+ Tregs in controlling tumor growth was further highlighted by the demonstration that depletion of Tregs using anti-CD25 antibodies can evoke effective anti-tumor immunity in mice (Shimizu et al. 1999. J. Immunol. 163: 5211-5218; Onizuka et al. 1999. Cancer Res. 59: 3128-3133). Moreover, anti-CD25 therapy enhanced the therapeutic efficacy of GM-CSF-secreting B16 tumor cells and prolonged survival of tumor-bearing animals (Sutmuller et al. 2001. J. Exp. Med. 194: 823-832). Cumulatively, these experimental data suggest that the efficacy of cancer treatment could be enhanced by administration of agents that lead to the preferential depletion of CD4+CD25+ Tregs, such as compounds that target cells expressing the IL-2 receptor CD25 subunit.

[0233] Recombinant IL-2 diphtheria toxin conjugate DAB389IL-2 (also known as denileukin diftitox and ONTAK®) to eliminate CD25-expressing Tregs in metastatic renal cell carcinoma (RCC) patients. The cytotoxic action of DAB389IL-2 occurs as a result of binding to the high-affinity IL-2 receptor, subsequent internalization, and enzymatic inhibition of protein synthesis, ultimately leading to cell death.

[0234] DAB389IL-2 was shown to selectively eliminate Tregs from human PBMCs in a dose-dependent manner without apparent bystander toxicity to other PBMCs or CD4+ T cells with intermediate- or low-level expression of CD25. Treg depletion resulted in enhanced stimulation of proliferative and cytotoxic T cell responses in vitro but only when DAB389IL-2 was used prior to and omitted during the T cell priming phase. Depletion of Tregs in RCC patients with DAB389IL-2 followed by immunization with tumor RNA-transfected DCs led to improved stimulation of tumor-specific T cells when compared with administration of tumor RNA-transfected DCs alone. CD4+CD25high Tregs can be eliminated using a single dose of DAB389IL-2 without apparent bystander toxicity and without having an impact on the function of other cells expressing CD25. DAB389IL-2 profoundly reduced the number of Tregs present in the peripheral blood of RCC patients, reduced levels of peripheral blood-derived FoxP3 transcripts, and abrogated Treg-mediated immunosuppressive activity in vivo. Moreover, significantly higher frequencies of tumor-specific CD8+ T cells could be measured in patients treated with combined DAB389IL-2 and DC immunization when compared with subjects receiving the DCs alone. Also, there was a trend toward an improved CD4+ T cell response after combined therapy.

[0235] Cognate immunity against neoplastic cells depends on a balance between effector T cells and regulatory T (Treg) cells. Treg cells prevent immune attack against normal and neoplastic cells by directly suppressing the activation of effector CD4+ and CD8+ T cells. The use of a recombinant interleukin 2/diphtheria toxin conjugate (DAB/IL2; Denileukin Diftitox; ONTAK®) was studied as a strategy to deplete Treg cells and break tolerance against neoplastic tumors in humans. DAB/IL2 (12 microg/kg; four daily doses; 21 day cycles) was administered to 16 patients with metastatic melanoma and the effects on the peripheral blood concentration of several T cell subsets and on tumor burden are measured.

[0236] Rasku et al. (J. Translational Medicine; 6: 12 (2008)) found that DAB/IL2 caused a transient depletion of Treg cells as well as total CD4+ and CD8+ T cells (<21 days). T cell repopulation coincided with the de novo appearance of melanoma antigen-specific CD8+ T cells in several patients as determined by flow cytometry using tetrameric MART-1, tyrosinase and gp100 peptide/MHC conjugates. Sixteen patients received at least one cycle of DAB/IL2 and five of these patients experienced regressions of melanoma metastases as measured by CT and/or PET imaging. One patient experienced a near complete response with the regression of several hepatic and pulmonary metastases coupled to the de novo appearance of MART-1-specific CD8+ T cells. A single metastatic tumor remained in this patient and, after surgical resection, immunohistochemical analysis revealed MART1+ melanoma cells surrounded by CD8+ T cells. The transient depletion of T cells in cancer patients may disrupt the homeostatic control of cognate immunity and allow for the expansion of effector T cells with specificity against neoplastic cells.

[0237] Recent work demonstrates that lack of naturally induced tumor associated antigen (TAA)-specific immunity is not simply a passive process. Barnett et al. (Am J Reprod Immunol. 54(6):321 (2005)) demonstrated that tumors actively prevent induction of TAA-specific immunity through induction of TAA-specific tolerance. This tolerance was mediated in part by regulatory T cells (Tregs). Barnett et al. presented evidence that depleting Tregs in human cancer, including ovarian cancer, using denileukin diftitox (ONTAK®), improves immunity.

[0238] CD4+CD25+Foxp3+ regulatory T (Treg) cells have been implicated in the lack of effective antitumor immunity (Litzinger et al. (2007) Blood; 110(9): 3192-201). Denileukin diftitox (DAB(389)IL-2), provides a means of targeting Treg cells. Treg cells in spleen, peripheral blood, and bone marrow of normal C57BL/6 mice were variously reduced after a single intraperitoneal injection of denileukin diftitox; the reduction was evident within 24 hours and lasted approximately 10 days. Injection of denileukin diftitox 1 day before immunization with another agent enhanced antigen-specific T-cell responses above levels induced by immunization alone. Litzinger et al. demonstrated in a murine model the differential effects of denileukin diftitox on Treg cells in different cellular compartments, the advantage of combining denileukin diftitox with another agent to enhance antigen-specific T-cell immune responses, the lack of inhibition by denileukin diftitox of host immune responses directed against a live viral vector, and the importance of dose scheduling of denileukin diftitox when used in combination with an immunogen.

[0239] Tregs have been shown to be an integral part of regulating and even suppressing an immune response to growing tumor cells. Matsushita et al. (J. Immunol. Methods; 333(1-2):167-79 (2008)) compared three methods of Treg depletion and/or elimination, utilizing low dose cyclophosphamide (CY), a specific antibody directed against the IL-2 receptor found on Tregs (PC61) and the use of denileukin diftitox (DD). Matsushita demonstrated that utilization of DD resulted in a >50% Treg cell reduction without parallel cytocidal effects upon other T cell subsets but did not enhance anti-tumor immunity against B16 melanoma. Lastly, the PC61 showed a moderate reduction of Tregs that lasted longer than the other reagents, without a reduction in the total number of CD8(+) T cells.

[0240] Provided herein is a method of enhancing activity of an anti-cancer agent (e.g., RNA transfected DCs, anti-CLTA4 antibodies, MISIIR scFvs, etc.), by administering a DT variant-IL2 fusion protein described herein. In one embodiment, a DT variant-IL2 fusion protein is administered followed by administration of the anti-cancer agent. In one non-limiting example, the DT variant-IL2 fusion protein is administered at least four (4) days prior to the anti-cancer agent.

[0241] Also provided herein is a method of treating a metastatic cancer via reduction or elimination of Tregs by administering an anti-cancer agent (e.g., RNA transfected DCs, anti-CLTA4 antibodies, MISIIR scFvs, etc.) and a DT variant-IL2 fusion protein described herein. Metastatic tumors include, for example, metastatic renal cell carcinoma, metastatic prostate cancer, metastatic ovarian cancer and metastatic lung cancer. In one embodiment, a DT variant-IL2 fusion protein is administered followed by administration of the anti-cancer agent. In one non-limiting example, the DT variant-IL2 fusion protein is administered at least four (4) days prior to the anti-cancer agent.

[0242] In another aspect, provided herein is a method of treating a prostate tumor, an ovarian tumor, a lung tumor or a melanoma via reduction or elimination of Tregs by administering an anti-cancer agent (e.g., RNA transfected DCs, anti-CLTA4 antibodies, MISIIR scFvs, etc.) and a DT variant-IL2 fusion protein described herein. In one embodiment, a DT variant-IL2 fusion protein is administered followed by administration of the anti-cancer agent. In one non-limiting example, the DT variant-IL2 fusion protein is administered at least four (4) days prior to the anti-cancer agent.

[0243] Toxicity and therapeutic efficacy of such ingredient can be determined by standard pharmaceutical procedures in cell cultures or experimental animals, e.g., for determining the LD₅₀ (the dose lethal to 50% of the population) and the ED50 (the dose therapeutically effective in 50% of the population). The dose ratio between toxic and therapeutic effects is the therapeutic index and it can be expressed as the ratio LD₅₀/ED₅₀. Compounds which exhibit large therapeutic indices are preferred. While compounds that exhibit toxic side effects may be used, care should be taken to design a delivery system that targets such compounds to the site of affected tissue in order to minimize potential damage to non-cancerous and otherwise healthy cells and, thereby, reduce side effects.

[0244] The data obtained from the cell culture assays and animal studies can be used in formulating a range of dosage for use in humans. The dosage of such compounds lies preferably within a range of circulating concentrations that include the ED₅₀ with little or no toxicity. The dosage may vary within this range depending upon the dosage form employed and the route of administration utilized. For any compound used in the method of the invention, the therapeutically effective dose can be estimated initially from cell culture assays. A dose may be formulated in animal models to achieve a circulating plasma concentration range that includes the IC₅₀ (i.e., the concentration of the test compound which achieves a half-maximal inhibition of symptoms) as determined in cell culture and as presented below in Example 4. Such information can be used to more accurately determine useful doses in humans. Levels in plasma may be measured, for example, by high performance liquid chromatography.

[0245] The embodiments of the compounds and methods of the present application are intended to be illustrative and not limiting. Modifications and variations can be made by persons skilled in the art in light of the above teachings specifically those that may pertain to alterations in the DT toxophore surrounding the described VLS sequences that could result in reduced HUVEC binding while maintaining near native functionally with respect to the ability to use as a DT toxophore in protein fusion toxin constructions.

[0246] It is also conceivable to one skilled in the art that the compounds and methods described herein can be used for other purposes, including, for example, the delivery of other novel molecules to a selected cell population.

[0247] The present application contemplates compositions for use in immunization embodiments. It is contemplated that proteinaceous compositions that are less effective in promoting VLS or other toxic effects by alterations in one or more (x)D(y), (x)D(y)T and/or flanking sequences are useful as antigens to stimulate an immune response to the toxin. In particular embodiments, DT comprising one or more modified (x)D(y), (x)D(y)T and/or flanking sequences are contemplated as useful antigens. Preferably the composition is extensively dialyzed to remove undesired small molecular weight molecules and/or lyophilized for more ready formulation into a desired vehicle. In other embodiments, it is also possible to use toxins lacking one or more active site residues (i.e., a toxoid) for immunization.

[0248] The compounds and methods described herein can be employed under those circumstances in which amounts of DT toxophore would be used to deliver such agents in a clinical setting or in settings where it would be desirable to reduce as much as possible the potential for VLS. In this setting the catalytic domain or some portion thereof would be replaced, rendered inactive and fused with the desired agent or molecule. Acid sensitive or protease sensitive cleavage sites could be inserted between the remnant of the catalytic domain and the desired agent or molecule.

[0249] Agents or molecules that might be coupled to VLS modified DT toxophore such as disclosed herein include but are not limited to; peptides or protein fragments, nucleic acids, oligonucleotides, acid insensitive proteins, glycoproteins, proteins or novel chemical entities that required selective delivery.

[0250] Therefore, it should be understood that changes may be made in the particular embodiments disclosed which are within the scope of what is described.

### VI. Packages and Kits

[0251] In still further embodiments, the present application concerns kits for use with the compounds described above. Toxins exhibiting reduced VLS promoting or toxic effects can be provided in a kit. Such kits may be used to combine the toxin with a specific cell binding ligand to produce a fusion protein that targets a particular receptor on a cell (e.g., IL-2 receptors on cancer cells) in a ready to use and storable container. The kits will thus comprise, in suitable container means, a composition with reduced VLS promoting activity. The kit may comprise a modified DT or a fusion protein thereof in suitable container means.

[0252] The container means of the kits will generally include at least one vial, test tube, flask, bottle, syringe and/or other container means, into which the at least one polypeptide can be placed, and/or preferably, suitably aliquoted. The kits can include a means for containing at least one fusion protein, detectable moiety, reporter molecule, and/or any other reagent containers in close confinement for commercial sale. Such containers may include injection and/or blow-molded plastic containers into which the desired vials are stored. Kits can also include printed material for use of the materials in the kit.

[0253] Packages and kits can additionally include a buffering agent, a preservative and/or a stabilizing agent in a pharmaceutical formulation. Each component of the kit can be enclosed within an individual container and all of the various containers can be within a single package. Invention kits can be designed for cold storage or room temperature storage.

[0254] Additionally, the preparations can contain stabilizers (such as bovine serum albumin (BSA)) to increase the shelf-life of the kits. Where the compositions are lyophilized, the kit can contain further preparations of solutions to reconstitute the lyophilized preparations. Acceptable reconstitution solutions are well known in the art and include, for example, pharmaceutically acceptable phosphate buffered saline (PBS).

[0255] Additionally, the packages or kits provided herein can further include any of the other moieties provided herein such as, for example, one or more reporter molecules and/or one or more detectable moieties/agents.

[0256] Packages and kits can further include one or more components for an assay, such as, for example, an ELISA assay, cytotoxicity assay, ADP-Ribosyltransferase activity assay, etc. Samples to be tested in this application include, for example, blood, plasma, and tissue sections and secretions, urine, lymph, and products thereof. Packages and kits can further include one or more components for collection of a sample (e.g., a syringe, a cup, a swab, etc.).

[0257] Packages and kits can further include a label specifying, for example, a product description, mode of administration and/or indication of treatment. Packages provided herein can include any of the compositions as described herein. The package can further include a label for treating a cancer.

[0258] The term “packaging material” refers to a physical structure housing the components of the kit. The packaging material can maintain the components sterilely, and can be made of material commonly used for such purposes (e.g., paper, corrugated fiber, glass, plastic, foil, ampules, etc.). The label or packaging insert can include appropriate written instructions. Kits, therefore, can additionally include labels or instructions for using the kit components in any method of the invention. A kit can include a compound in a pack, or dispenser together with instructions for administering the compound in a method described herein.

[0259] Instructions can include instructions for practicing any of the methods described herein including treatment methods. Instructions can additionally include indications of a satisfactory clinical endpoint or any adverse symptoms that may occur, or additional information required by regulatory agencies such as the Food and Drug Administration for use on a human subject.

[0260] The instructions may be on “printed matter,” e.g., on paper or cardboard within or affixed to the kit, or on a label affixed to the kit or packaging material, or attached to a vial or tube containing a component of the kit. Instructions may additionally be included on a computer readable medium, such as a disk (floppy diskette or hard disk), optical CD such as CD- or DVD-ROM RAM, magnetic tape, electrical storage media such as RAM and ROM, IC tip and hybrids of these such as magnetic/optical storage media.

### EXAMPLES

[0261] The application may be better understood by reference to the following non-limiting examples, which are provided as exemplary embodiments of the application. The following examples are presented in order to more fully illustrate embodiments of the invention and should in no-way be construed, however, as limiting the broad scope of the application. While certain embodiments of the present application have been shown and described herein, it will be obvious that such embodiments are provided by way of example only. Numerous variations, changes, and substitutions will now occur to those skilled in the art without departing from the invention. It should be understood that various alternatives to the embodiments described herein may be employed in practicing the methods described herein.

### Example 1

### Construction, Expression and Purification of DT Variant and DT-Fusion Proteins

[0262] Construction of DT Variant and DT-Fusion Proteins

[0263] A truncated DT-based toxophore comprising a methionine residue at the N-terminus and amino acid residues 1 through 386 (SEQ ID NO: 2) of the native DT (now residues 2-387 in the truncated toxophore) is constructed as DT387 or residues 1-382 of DT387. The DT-based toxophore can also comprise a methionine residue at the N-terminus, amino acid residues 1 through 386 (SEQ ID NO: 2) of the native DT (now residues 2-387 in the truncated toxophore), and residues 484-485 of native DT, constructed as DT389. DT387 and DT389 contains three (x)D(y) motifs at residues 7-9 (VDS), residues 29-31 (VDS), and residues 290-292 (IDS). DT382 contains residues 1-382 of DT387 or DT389. Other C-terminal truncated DT constructs as described herein can be used in the assays provided herein for testing functionality of DT variants. One would understand that modifications made to DT389 also could be made in a truncated construct (e.g., DT382) and tested for functionality. FIG. 12 provides amino acid sequences of wild type DT382, DT382 variants, and null construct DT382(G53E): underlined sequences are vector/tag sequences; enterokinase cleavage site highlighted in italicized text; and mutations from WT sequences are shown in bold text.

[0264] Site directed mutagenesis is employed to alter the (x)D(y) motif in DT. A Stratagene Quickchange mutagenesis kit is used to construct the mutations. Oligonucleotide primers are designed to alter encoding residues within the (x)D(y) motif implicated in VLS.

[0265] SEQ ID NOS: 4-147 provides a list of non-limiting exemplary modified DTs and the corresponding amino acid sequences.

[0266] The mutants are tested in the context of protein fusion toxin genetically fused to sequences encoding human interleukin 2 (SEQ ID NO: 3) or a cell binding portion thereof. DT-fusion proteins are expressed and purified.

[0267] Expression and Purification of DT Variants and DT-Fusion Proteins

[0268] Plasmid constructs encoding truncated DT protein, DT mutants, and DT-fusion protein are transformed into E. coli HMS 174 (DE3) cells. E. coli HMS 174 is a protease-deficient strain in which over-expression of recombinant proteins can be achieved. Induction of the recombinant protein expression is obtained by addition of isopropylthiogalactosidase (IPTG) to E. coli HMS 174. Following incubation, the bacterial cells are harvested by centrifugation and lysed, and the recombinant protein is further purified from inclusion body preparations as described by Murphy and vanderSpek, Methods in Molecular Biology, Bacterial Toxins: Methods and Protocols, 145:89-99 Humana press, Totowa, N.J. (2000). It may be necessary to remove endotoxin from the protein preparations to assure that effects on HUVECs are from VLS and not due to the presence of the endotoxin. Endotoxin is removed to <250 EU/ml by passage over an ion-exchange resin. Separation of breakdown products from full-length material also occurs during ion-exchange chromatography. After another final purification over ion exchange resin, endotoxin is reduced to <25 EU/ml and the toxophore is tested for VLS as a function of HUVEC cell binding in vitro. Analysis of DT387 or DT389 toxophore can be conducted using Coomassie Blue staining and Western Blot when samples from the process described above are resolved by SDS Polyacrylamide Gel Electrophoresis (PAGE) using conventional techniques described herein and known in the art.

[0269] Mutations that result in stable constructs with adequate expression that do not affect ribosyltransferase activity of the DT387 toxophore can be subsequently tested for targeted cytotoxicity in the corresponding VLS modified DT-EGF and VLS modified DT-IL-2 protein fusion toxins (Example 5 respectively).

### Example 2

### Cell Permeabilization Assays

[0270] Human vascular endothelial cells are maintained in EGM media (obtained from Cambrex, Walkersville, Md.). Sub-confluent early passage cells are seeded at equivalent cell counts onto plastic cover slips. Purified, endotoxin free wild type DT toxophore and mutants are labeled with the fluorescent tag F-150 (Molecular Probes, Eugene, Oreg.) through chemical conjugation. HUVECs are incubated with equivalent amounts of the labeled toxophores. The media is then aspirated, and the cells are then washed, fixed and prepared for analysis. Examination of the cells on cover slips from different treatment groups permits the analysis of the number of cells labeled by the fluorescent toxophore. No targeting ligand is present on the toxophore and, consequently, the level of HUVEC interaction is proportional only to the toxophores affinity for HUVECs. Comparisons are carried out using a fluorescent microscope and comparing the number of cells labeled from at least ten independent fields, different cover slips or different slides. DAPI stain is used to localize cells, particularly in the case of the mutant constructs as cell labeling is not readily apparent. 4′-6-Dianidino-2-phenylindole (DAPI) is known to form fluorescent complexes with natural double-stranded DNA; as such DAPI is a useful tool in various cytochemical investigations. When DAPI binds to DNA, its fluorescence is strongly enhanced. Thus, DAPI serves as a method of labeling cell nuclei. In contrast, cells treated with F-150DT toxophore are easily observed. To facilitate that quantification of the mutant DT toxophore constructs, the signal intensity and changes in background signal are also increased.

[0271] Effect of the DT variant IL-2 fusion proteins on the morphology of HUVEC monolayers can also be assessed according to methods described, by example, Baluna et al. (Int. J. Immunopharm., 18:355-361, 1996) and Soler-Rodriguez et al. (Exp. Cell Res., 206:227-234, 1993). To determine whether the VLS sequences in DT and IL-2 damage HUVECs, monolayers are incubated with different concentrations of DT variants, DT variant-IL-2-fusion proteins, or controls. HUVECs are isolated, cultured and studied microscopically. Briefly, HUVEC monolayers are incubated at 37° C. for 18 hours with 10-6 M of each variant, fusion protein, control, or medium-only and then examined by phase-contrast microscopy (magnification at 20 times). Normal monolayers consist of highly packed cells with elogated shapes, whereas damaged cells round up and detach from the plate. Untreated HUVECs consist of tightly packed elongated cells. Monolayers can be assessed after 2 hours for cell rounding after 2 hr of incubation and after 18 hours for formation of gaps in the monolayer. Toxic effects on HUVECs are assessed.

[0272] Another method for measuring permeability of endothelial monolayers in vitro has been described in detail previously (Friedman et al. J. Cell. Physiol., 129: 237-249 (1986); Downie et al. Am. J. Resp. Cell. Mol. Biol., 7(1): 58-65 (1992)). After incubation with the various media described, the filters containing confluent endothelial cells are washed 2 times with PBS. The filters with attached endothelial cells are then mounted in modified flux chambers, and the chambers placed in a culture dish. The upper well of the chamber is filled with serum-free medium containing 50 mM Hepes. The dish is filled with the same medium. A stirring bar is added to the lower well, and the entire chamber placed on an electrical stirring device and incubated at 37° C. The chamber is incubated until the level of media between the upper well and the surrounding fluid in the beaker is equal. Thus, no hydrostatic pressure difference is present between the upper and lower wells. After this equilibration period, a small aliquot of medium in the upper well is removed and replaced with medium containing [¹²⁵I]bovine serum albumin (30,000 cpm/ml). The radiolabeled albumin is extensively dialyzed against 1 M PBS immediately before use. Chromatographic monitoring of the dialyzed [¹²⁵I]albumin as well as the media in the lower well after the end of the study is demonstrated >95% of the ¹²⁵I to co-chromatograph with albumin (Friedman et al. J. Cell. Physiol., 129: 237-249 (1986)). Small aliquots of media (in triplicate) are removed serially from both the upper and lower wells 10, 30, 60, 120, 180, and 240 min after the addition of the ¹²⁵I probe. The ¹²⁵I activity in each aliquot is measured in a gamma counter, and the average cpm/ml for the samples from the upper and lower wells is determined. Appropriate corrections are made for background using the experimental media. The [¹²⁵I]albumin transfer rate of the BPAEC monolayers is expressed as the rate of appearance of counts in the lower well relative to the number of counts in the upper well/hour over the 90 to 240-min period of steady-state clearance (Friedman et al. J. Cell. Physiol., 129: 237-249 (1986)). Each albumin transfer rate point (“n”) represents the average rate of duplicate filters within a group. Each group of filters included duplicate control filters (i.e., monolayers on filters incubated with diluent alone). In additional filters, non-radiolabeled bovine serum albumin (final concentration of 1%) is added along with [¹²⁵I]bovine serum albumin in the upper well. The [¹²⁵I]albumin transfer rate across the monolayer is determined using the previously described method. The endothelial monolayers is expected to be more intact after exposure to DTvariant-IL-2 fusion proteins compared to unmodified DT-IL-2 fusion proteins.

[0273] In yet another assay, channel-forming activities of the mutants of DT-IL-2 are determined using a planar lipid bilayer membrane system (vanderSpek et al., J. Biol. Chem. 268: 12077-12082 (1993); Silverman et al., J. Membr. Biol. 137: 17-28 (1994); Hu et al. Prot. Eng. 11(9): 811-817 (1998)) and compared to unmodified DT-IL-2. The membranes are formed across 50-100 μm apertures are made in polystyrene cups. A 1% hexane solution of lecithin type IIS (Sigma) with the neutral lipids removed (Kagawa and Racker, Biol. Chem. 246: 5477-5487 (1971)) is used to coat both sides of the aperture and allowed to dry. The outside of the aperture is then coated with a 1.5% squalene solution prepared in light petroleum. The cup is placed in the back chamber of a block prepared by Warner Instruments (Hamden, Conn.). A buffer solution (1 M KCl, 2 mM CaCl₂, 1 mM EDTA, 50 mM HEPES, pH 7.2) is added to the cup to above the level of the aperture (0.5 ml). The front chamber of the block is filled with 1.0 ml of the same buffer solution, except with 30 mM MES, pH 5.3, instead of the HEPES. A 50 μl aliquot of the lecithin hexane solution is layered on top of the buffer in the front chamber and the hexane is allowed to evaporate. The buffer in the front chamber is then lowered and raised above the level of the aperture and the planar lipid bilayer is formed. Unmodified DT-IL-2 fusion proteins and DT variant-IL-2 fusion proteins thereof are added to the front chamber at concentrations ranging from 20 to 730 ng/ml. A voltage of +60 mV is applied across the membrane using voltage clamp conditions. The back chamber of the block, containing the cup, is held at virtual ground and the voltages refer to the front chamber to which the proteins are added. Current is monitored using standard methods (Jakes et al., J. Biol. Chem. 265: 6984-6991 (1989)). Channel conductances are determined using the equation g=I/V, where g is the conductance, I is the current flowing through the membrane and V is the voltage applied across the membrane. The lipid bilayer is expected to be more intact after exposure to DTvariant-IL-2 fusion proteins compared to unmodified DT-IL-2 fusion proteins.

### Example 3

[0274] This example describes a method for testing ADP-Ribosyltransferase Activity. Ribosome inactivating protein toxins, such as diphtheria toxin, catalyze the covalent modification of translation elongation factor 2 (EF-2). Ribosylation of a modified histidine residue in EF-2 halts protein synthesis at the ribosome and results in cell death. Ribosyltransferase assays to determine catalytic activity of the DT387 mutants are performed in 50 mM Tris-Cl, pH8.0, 25 mM EDTA, 20 mM Dithiothreitol, 0.4 mg/ml purified EF-2, and 1.0 μM [³²P]-NAD+(10 mCi/ml, 1000 Ci/mmol, Amersham-Pharmacia). The purified mutant proteins are tested in a final reaction volume of 40 μl. The reactions are performed in 96 well, V-bottom microtiter plates (Linbro) and incubated at room temperature for an hour. Proteins are precipitated by addition of 200 μl 10% TCA and collected on glass fiber filters, and radioactivity is determined by standard protocols. Traditional methods for measuring ADP-ribosylation use permeabilized cells treated with double stranded (ds) activator DNA oligonucleotide; subsequent measurement of radiolabeled NAD+ is incorporated into acid insoluble material. FACS-based methods such as those described by Kunzmann et al. (Immunity & Ageing 3:8 (2006)) are also available.

### Example 4

### Cytotoxicity Assays on Crude Extracts of Modified DT-IL-2 Fusion Proteins

[0275] The DT387 or DT389 construct is initially used to demonstrate that VLS-modified toxophores can be chemically coupled to a number of targeting ligands and yield functional targeted toxins. Single chain fusions toxins, as exemplified by DT387linker IL-2 or DT389linker IL-2, circumvent the scale-up purification problems typically encountered in the development of conjugate toxins. To confirm the effects of the engineered changes, a number of VLS modified DT387IL-2 or DT389IL-2 fusion toxins are produced and tested in cytotoxicity assays.

[0276] Amino acid substitutions made, as described above; to determine that the changes do not yield inactive toxophores incapable of producing fusion toxins, cytotoxicity assays are performed.

[0277] Cytotoxicity Assays

[0278] Cytotoxicity assays are performed using HUT102/6TG cells, a human HTLV1 transformed T-cell line that expresses high affinity IL-2 receptors. HUT102/6TG cells are maintained in RPMI 1640 (Gibco) media supplemented with 10% fetal bovine serum, 2 mM glutamine, 50 IU/ml penicillin and 50 μg/ml streptomycin. The cells are seeded at a density of 5×10⁴/well into 96 well, V-microtiter plates. The fusion protein toxins are typically added to the wells in molarities ranging from 10⁻⁷ M down to 10⁻¹² M. Final volume in the wells is 200 μl. The plates are incubated for 18 hours, at 37° C. in a 5% CO₂ environment. The plates are subjected to centrifugation to pellet the cells, the media removed and replaced with 200 μl leucine-free, minimal essential medium containing 1.0 μCi/ml[¹⁴C] leucine (<280 mCi/mmol, Amersham-Pharmacia) and 21 mM glutamine, 50 IU/ml penicillin and 50 μg/ml streptomycin. The cells are pulsed for 90 minutes and then the plates subjected to centrifugation to pellet the cells. The supernatant is removed and the cells are lysed in 60 μl, 0.4 M KOH followed by a 10 minute incubation at room temperature. 140 μl of 10% TCA is then added to each well and another 10 minute, room temperature incubation is performed. The precipitated proteins are collected on glass fiber filters using a PHD cell harvester and the incorporated radioactivity is determined using standard methods. The results are reported as a percentage of control (no fusion protein added to inhibit protein synthesis) [¹⁴C]-leucine incorporation. Toxilight™, Vialight™ and ALAMARBLUE™ kits are non-radioactive, commercial assays which can be used to assess the variants. The assays are conducted in a 96-well plate format, titrating toxin (10⁻⁷-10⁻¹² M) over time using susceptible and resistant cell lines.

[0279] Pharmaceutical grade GMP purified DAB₃₈₉IL-2 produced from E. coli typically yields an IC₅₀ of between 5×10⁻¹¹ M to 1×10⁻¹² M. Partially purified toxins exhibit activity between 10-100 fold lower in partially purified non-homogenous extracts. Pharmaceutical grade toxins are purified to homogeneity and the active fractions of refolded fusion toxins are used as biologically active drug. In the example above we utilize a moderate through put analysis to determine the receptor specific cytotoxicity of partially purified VLS modified DT-IL-2 fusion toxins and compared them to the activity of similarly purified DAB₃₈₉IL-2. These assays demonstrate comparable activity of the VLS modified DT₃₈₇linker IL-2 fusion to DAB₃₈₉IL-2. It should be noted that the calculation of specific cytotoxicity was based upon the total amount of protein in the samples of partially fusion toxin. For assays equimolar concentrations of fusion toxins were tested.

[0280] The relative amounts of non-fusion toxins protein in each sample could artificially alter the IC₅₀ of any given construct. That is, the presence of non full length or non fusion toxin protein in the samples used in this analysis could potentially account for small differences in IC₅₀.

[0281] Purified DAB₃₈₉IL-2 produced in E. coli typically yields an IC₅₀ of between 5×10⁻¹¹ M and 1×10⁻¹² M.

[0282] A moderate throughput cytotoxicity assay is used to analyze crude purifications of VLS modified DT-IL-2 fusion toxins and compare them to the activity of similarly purified DT387linker IL-2.

[0283] It should be noted that there is one (x)D(y) motif in IL-2 located at residues 19-21 (LDL). The contribution of IL-2 to VLS can be determined by modifying the (x)D(y) motif in the IL-2 and test the modified protein using the cytotoxicity assay described above. For example, using modified DT mutants derived from DT₃₈₇ or DT₃₈₇linker IL-2, it is possible to distinguish between effects of the mutations on catalytic activity, VLS activity and effective delivery of the targeted toxin to the cytosol of target cells. The comparison between modified DT mutants of DT₃₈₇ and DT₃₈₇linker IL2 will also separate the effects of modified sequences of the toxophore alone from the IL-2 targeting ligand present in DT₃₈₇linker IL-2. In another example, using modified DT mutants derived from both DT₃₈₉ and DT₃₈₉linker IL-2, it is possible to distinguish between effects of the mutations on catalytic activity, VLS activity and effective delivery of the targeted toxin to the cytosol of target cells. The comparison between modified DT mutants of DT₃₈₉ and DT₃₈₉linker IL2 will also separate the effects of modified sequences of the toxophore alone from the IL-2 targeting ligand present in DT₃₈₉linker IL-2.

### Example 5

[0284] This example describes an in vivo method to test the effect of fusion proteins described herein. A model has been developed to study the effect of toxin-containing fusion proteins on human endothelium in vivo by grafting vascularized human skin onto SCID mice, injecting the mice with toxin-containing fusion proteins and measuring fluid accumulation in the graft as the wet/dry weight ratio (Baluna and Vitetta, J. Immunother., 22(1):4147 (1999)). Fluid accumulation in the human skin is measured by weighing punch biopsies of the skin grafts before and after freeze drying. This model can be used to evaluate the effect of the modified DT fusion proteins described herein in vivo.

[0285] The fluid accumulation in the lungs of normal SCID mice is also used as a surrogate model for VLS. IL-2 has been shown to induce fluid accumulation in the lungs of mice (Orucevic and Lala, J Immunother Emphasis Tumor Immunol., 18(4):210-220 (1995)). The water content of the lungs or skin grafts is calculated as the wet/dry weight ratio. In this model, pulmonary vascular leak can also be assessed by measuring the accumulation in the lungs of ¹²⁵I-albumin injected intravenously (Smallshaw et al. Nature Biotechnology 21:387-391 (2003)).

### Example 6

[0286] Multiple assays are available to test the function of DT variants described herein such as, for example, in vitro cytotoxicity assays, in vitro vascular toxicity, in vivo mouse models as well as any other assay described herein or known in the art.

[0287] In Vitro Cytotoxicity Assays

[0288] The cytotoxic activities of the different modified DT fusion proteins are determined using CD22⁺ Daudi cells and [³H]-leucine incorporation as described previously (Ghetie et al., (1988) Cancer Res. 48:2610). The concentration of fusion protein which reduces [³H]-leucine incorporation by 50% relative to an untreated control culture is defined as the IC₅₀.

[0289] Vascular Toxicity

[0290] As a first step in evaluating the ability of fusion proteins prepared with modified DTs to induce vascular damage, a series of in vitro studies using HUVECs can be conducted. For in vitro assays, the effect of modified DT fusion proteins on the morphology of HUVEC monolayers is tested as described previously (Baluna et al., (1996) Immunopharmacology, 37:117-132).

[0291] In Vivo Assays

[0292] The effects of modified DT fusion proteins can be determined in the SCID/Daudi tumor model (Ghetie et al., (1992) Blood. 80(9): 2315-2320). Briefly, female SCID mice are injected intraveneously (i.v.; lateral tail vein) with 5×10⁶ Daudi cells on day zero. Fusion proteins are injected i.v. on days 1, 2, 3 and 4. Groups of 5 mice are used for each treatment and studies are repeated. Treatment groups receive (1) no treatment (control); (2) unmodified DT fusion proteins; or (3) modified DT fusion proteins. Mice are followed and sacrificed when the paralysis of their hind legs occurs. Pulmonary vascular leak in SCID mice is evaluated as described (Baluna et al., J. Immunother., (1999) 22(1):41-47). The water content of the lungs is calculated as the wet/dry weight ratios of lungs removed from mice injected with 10 μg modified DT fusion protein/g of mouse weight.

### Example 7

[0293] The methods described herein below are to generate variants of DT with reduced VLS using the following stages:

[0294] Stage 1—assays for DT activity;

[0295] Stage 2—gene synthesis, expression and purification of whole DT in E. coli in a format suitable for screening multiple variants (approximately 100-250 variants);

[0296] Stage 3—generation and testing of DT variants for reduced VLS (HUVEC binding assay)—two rounds of variants (single locus/multiple loci) are planned; and

[0297] Stage 4—construction and expression of variant DT-IL2.

[0298] Due to testing multiple variants of the full DT-IL2 molecule, stage 2 uses truncated DT variants without the wild-type receptor binding (R) domain (DT (ΔR)) while stage 3 uses full length DT. Modifications are made in the catalytic (C) and membrane-inserting (I) domains (translocation (T) domains) and the wild-type R domain of DT is added for cell entry. Stage 4 involves generating a fusion of the lead DT variant by fusion with human IL-2 (2-133).

### Example 8

[0299] VLS Assays

[0300] Various assays can be used to assess VLS activity of DT variants as described herein.

[0301] In one assay, DT-IL2 or variants are conjugated to fluorescein. Fluorescence microscopy/manual counting of labeled cells can be used to assess direct binding to HUVEC cells as surrogate for VLS activity.

[0302] In vivo studies; morphological changes; cell monolayer permeability or loss of cell membrane integrity; and correlation with CD31 expression represent various means by which the variants described herein can be detected can also be used to assess VLS activity.

[0303] (a) Detection with Antibodies

[0304] DT-specific antibodies can be used to detect DT bound to endothelial cell surface via VLS motif. Common epitopes were directly labeled to detect differences in binding between variants. An ELISA was used to confirm specificity/affinity of available anti-DT antibodies. In addition to the method described here, His-tag Abs provide another means by which DT variants can be selected.

[0305] FIG. 2 illustrates binding of a DT variant (DT-Glu52; CRM mutant) to HUVEC cells and detection by antibodies using FACS analysis.

[0306] (b) Direct Conjugates

[0307] Direct conjugates of DT and toxin variants to fluorochrome (Alexa 488) can be used to assess DT variants described herein. Alexa dyes are highly stable and bright. The Microscale Protein Labelling Kit (Molecular Probes/Invitrogen: A30006) allows microscale labelling of protein (20-100 ug). The degree of labelling (DOL) can be optimised and the dye: protein (D:P) ratio is measured by spectrophotometer and reproducible. FACS is used to measure fluorescence.

[0308] The assay achieved good detection of ONTAK-A1488 and control DT-Glu52-A1488 binding to HUVEC cells as illustrated in FIG. 3. The assay achieved good detection of ONTAK-A1488 and control DT(ΔR)-A1488 binding to HUVEC cells compared to binding of BSA-A1488 as illustrated in FIG. 11. The assay achieved good detection of ONTAK-A1488 and control DT(ΔR)-A1488 binding to HUVEC cells compared to binding of BSA-A1488 as illustrated in FIG. 11.

[0309] HUVEC cells were tested for IL-2R expression by FACS: it was confirmed that ONTAK-A1488 binding to HUVEC cells is independent of IL-R as shown in FIG. 4.

### (c) Cell Membrane Integrity

[0310] Cell membrane integrity can be assessed to measure loss of integrity of cell membranes after exposure to toxins. Peptides encompassing VLS motifs were directly conjugated to a fluorochrome using methods as described by Baluna et al (PNAS USA, 96: 3957 (1999)). Alternatively, other assays described herein or known in the art can be utilized.

[0311] Cell membrane integrity assays were conducted using propidium iodide (PI) and the effect on the toxins was assessed by FACS to measure PI uptake as a surrogate for loss of integrity of cell membrane after short incubation with toxins (FIG. 5).

[0312] For potential to induce VLS, a HUVEC cell DT-binding assay is tested using truncated DT (ΔR) comprising the C and I domains only. DT molecules are labeled for analysis of binding to HUVEC. This step utilizes expression of DT(ΔR) from stage 3 (described above) and, thus, generation of HUVEC assays is initiated after DT expression. Alternatively, other assays described herein or known in the art can be utilized.

[0313] DT Activity/Cytotoxicity Assays

[0314] Assays suitable for measurement of DT activity have been established. Cytotoxicity assays are utilized to confirm toxin activity of DT-IL2 T cell epitope and VLS variant leads selected in IVTT assays.

[0315] (a) In Vitro Transcription-Translation (IVTT) Assay

[0316] Using an in vitro transcription-translation (IVTT) assay to measure DT activity, direct transcription/translation of DT genes was tested using a rabbit reticulocyte lysate system. Typically this involves coupled transcription/translation of a luciferase gene with a chemiluminescent assay which measures IVTT of target plasmid (T7-luciferase)—active toxin inhibits and reduces luciferase signal. PCR products are utilized allowing medium throughput screening (MTS) with a titration curve and all variants are compared to WT DT in the same 96-well assay plate. A surrogate IC₅₀ can be determined from an inhibition curve. Since DT binds and causes the covalent modification of elongation factor 2 (EF2), this should cause an inhibition of luciferase production for active DT variants. Coupled transcription/translation assays can be used for analysis of ribosome-inhibitory proteins to provide information on activity of the C domain of DT. Various methods are known to those of skill in the art that are useful in carrying out such coupled transcription/translation assays reactions such as, for example, described in U.S. Pat. Nos. 5,976,806 and 5,695,983, each of which is hereby incorporated by reference in its entirety.

[0317] Using the IVTT assay described herein, it was shown that WT ΔR DT demonstrated dose-dependant inhibition of transcription/translation of T7-luc plasmid approaching 90% while the null (Glu52E) plateaued at approximately 20% inhibition (FIG. 1).

[0318] (b) Luminescent Cytotoxicity Assay

[0319] Toxilight™, Vialight™ and ALAMARBLUE™ kits are non-radioactive, commercial assays which can be used to measure cytotoxicity. The assays are conducted in a 96-well plate format, titrating toxin (10⁻⁷-10⁻¹² M) over time using susceptible and resistant cell lines. Cytotoxicity of ONTAK vs. IL-2 to human T cell lines was assessed using the Toxilight kit at 48 hours; luminescence counts per second (LCPS) reflect the degree of adenylate kinase release (FIG. 6).

[0320] (c) Ribosyltransferase Assay

[0321] In addition to the coupled transcription/translation assay, a ribosyltransferase assay (such as described in Example 3) was established in a 96-well format. This assay uses samples of DT from expression of DT genes in E. coli (stage 3) and is tested in conjunction with the coupled transcription/translation assay above. Traditional methods for measuring ADP-ribosylation use permeabilized cells treated with double stranded (ds) activator DNA oligonucleotide; subsequent measurement of radiolabeled NAD+ is incorporated into acid insoluble material.

[0322] New FACS-based methods such as those described by Kunzmann et al. (2006 Immunity & Ageing) are also available.

[0323] For measurement of cytotoxicity of DT variants, a cellular cytotoxicity assay (such as described in Example 4) is developed, using HUT102-6TG cells in a 96-well format for analysis of full length DT variants (HUT102-6TG is the cell line used for final analysis of the lead DT-IL-2 protein). As the cellular cytotoxicity assay requires expression of full length DT, this assay is used after DT expression in stage 3.

### Example 9

### Gene Synthesis, Expression and Purification

[0324] DT and human IL-2 genes are synthesized at the start of stage 2 using codons optimized for expression in E. coli using conventional techniques known in the art. For generation of full length DT and DT(ΔR) (comprising the C and I domains only) to be used in analysis in cellular cytotoxicity and HUVEC binding assays (see stage 1), vector systems are used which include secretory leader sequences for export of DT into the periplasmic space of E. coli. Methods for purification of DT include, for example, purification via affinity tags fused to DT (e.g., a His6 tag). The method developed in stage 2 provides for reliable production of multiple DT variants with similar quality such that the activities of these variants can be accurately compared in order to identify lead candidates in stages 3 and 4.

### Example 10

### Design and Construction of VLS Variants of DT

[0325] Variants of DT for reduction in potential to reduce VLS are generated by two rounds of mutation: first, with separate mutations at each of the three (x)D(y) motifs in DT and, second, with combinations of lead mutations with optional additional mutations. Each DT variant is tested in the HUVEC binding assay (stage 1 or Example 6). Generation of DT variants for these assays are by expression of truncated DT (ΔR) in E. coli (stage 2).

### Example 11

### DT VLS Variants Inhibit Protein Synthesis

[0326] A DT382 construct was used and contained amino acid residues 1-382 of SEQ ID NO: 2 or 149 of DT as well as IL2. A restriction enzyme site was engineered at amino acid residue 382 for cloning in either the R domain or the IL2 portion. Modifications are incorporated as described below.

[0327] Variants of DT382 gene were produced where VLS motifs were mutated such that the recognized x(D)y motif was disrupted. The activity of variants at single and multiple loci were assessed for activity in an in vitro transcription/translation assay using PCR products.

[0328] Briefly, the activity of single and combined variants was measured in an in vitro transcription/translation assay. Purified PCR product of each variant was titrated into a TnT coupled transcription/translation reaction mix (#L4610 Promega, Madison Wis., according to the manufacturer's instructions) containing rabbit reticulocyte lysate, TnT buffer, T7 RNA polymerase, amino acid mix—Met, amino acid mix—Leu and RNasin (#N2511 Promega, Madison Wis.) using a DNA range from 1 ng to 64 ng per reaction in a total volume of 10.5 μl. Reactions were incubated at 30° C. for 30 minutes to allow for possible differences in the rate of DT gene translation between the different variants. T7-luciferase control plasmid (250 ng) was then added and reactions were incubated for a further 45 minutes at 30° C. Expression of luciferase was measured by luminescence after incubating the reaction with SteadyGlo luciferase assay reagent, according to manufacturer's instructions (#E2510 Promega, Madison Wis.). Luminescent readout was measured using BMG FLUOstar OPTIMA fluorescent plate reader (BMG Labtech, Durham, N.C.).

[0329] Twenty-eight (28) VLS mutants have been designed and constructed. Eighteen out of twenty-eight (18/28) VLS mutants have been tested in an IVTT assay. Known VLS variants were show to have equivalent activity to wild type (WT) and a number of alternative VLS variants have also been identified that demonstrate activity equivalent to or better than WT (FIG. 7). FIG. 8 shows representative results for mutants of the epitopes, demonstrating that mutants have been obtained for each epitope that retain wild type activity.

[0330] Percentage inhibition of protein synthesis was plotted against DNA concentration in the reaction and the resulting curves were used to calculate the IC₅₀ for each variant. IC₅₀s were normalized to allow for inter-assay variation by dividing the IC₅₀ of wild type DT (included on every assay plate) with the IC₅₀ of the DT variant.

[0331] Table 2 provides IC₅₀ data for two VLS modified DT variants compared to wild-type and a null DT variant.

| Molecule | IC₅₀ (ng/12.5 μl) | Relative Activity |
|---|---|---|
| WT | 20.27 | 1.00 |
| D30N | 37.93 | 0.53 |
| S31G | 40.57 | 0.5 |
| Null | 46.65 | 0.43 |

[0332] Table 3 provides a relative IVTT score for VLS mutations compared to wild type. The relative IVTT score is determined by dividing the IC50 of wild type DT by the IC50 of the mutant DT.

| Mutation | Relative IVTT score | Activity Compared to WT |
|---|---|---|
| V7S | 1.00 | Equivalent |
| V7T | 0.93 | Equivalent |
| V7N | 0.63 | Reduced |
| V7D | 0.57 | Reduced |
| D8E | 0.90 | Equivalent |
| D8N | 0.36 | Inactive |
| S9A | 2.25 | Improved |
| S9G | 0.48 | Inactive |
| S9T | 1.5 | Equivalent |
| V28S | 3.61 | Improved |
| V29T | 1.57 | Equivalent |
| V29N | 2.47 | Improved |
| V29D | 1.51 | Equivalent |
| D30E | 2.18 | Improved |
| D30N | 0.56 | Reduced |
| S31T | 0.14 | Inactive |
| S31G | 0.26 | Inactive |
| S31N | 1.85 | Equivalent |
| I290S | 0.07 | Inactive |
| I290T | 4.41 | Improved |
| I290D | 0.43 | Inactive |
| D291E | 1.84 | Equivalent |
| S292A | 1.00 | Equivalent |
| S292T | 2.11 | Improved |
| S292G | 0.65 | Reduced |
| V7N V29N | 1.18 | Equivalent |
| V7N V29T | 1.56 | Equivalent |
| V7N V29D | 1.18 | Equivalent |
| V7T V29N | 0.78 | Equivalent |
| V7T V29T | 0.97 | Equivalent |
| V7T V29D | 1.15 | Equivalent |

[0333] FIG. 9 shows the relative activities of VLS DT variants compared to wild type DT in the inhibition of protein synthesis. The data shows that the following VLS variants: V7N V29N I290N, V7N V29N I290T, V7N V29N S292A, V7N V29N S292T, V7N V29T I290N, V7N V29T I290T, V7N V29T S292A, V7N V29T S292T, and V7T V29T I290T all show equivalent activity to DT382 in the inhibition of protein synthesis. In contrast, a G53E substitution of DT382 results in a decrease in activity. As described herein, a reference to a G52 modification refers to amino acid residue numbering of a DT molecule of SEQ ID NO: 1 that does not contain the N-terminal methionine.

### Example 12

### Binding of VLS Variants to HUVECs

[0334] Human vascular endothelial cells (HUVEC) were maintained in EBM (CC-3124 Lonza, Basel, Switzerland). Before use, cells were detached from plastic substratum using an enzyme free dissociation buffer (C5914 Sigma, Poole, UK) and resuspended in phosphate buffered saline containing 1% BSA and 0.05% NaN₃. Cells were then incubated in the same buffer containing 5% normal human serum for 20 minutes before adding a titration of purified DT382 protein (prepared as described above in Example 12) or DT382 VLS variants that had been conjugated to Alexa488 fluorochrome (A30006 Invitrogen, Carlsbad Calif.), according to the manufacturer's instructions. The cells were incubated with the labelled protein for 30 minutes before being washed and resuspended in PBS+1% BSA+0.05% NaN₃ buffer. Labelled DT-389-IL2 fusion was used as a positive control and labelled BSA was used as a negative control. Cells were then analyzed on a FACSCalibur flow cytometer (Becton Dickinson, Franklin Lakes, N.J.) and fluorescent staining of the cell population was measured. The percentage of cells that showed above background staining was then plotted against the concentration of labelled protein used.

[0335] FIG. 10 shows binding of labelled DT382 VLS variants to HUVEC cells. Labelled DT-389-IL2 fusion (ONTAK®) was used as a positive control and labelled BSA was used as a negative control. The data shows that purified Alexa488 labelled DT382 and DT389-IL2 (positive control) bind to HUVEC at similar levels. In contrast, binding of the VLS variants V7N V29T S292T (shown), V7N V29T I290N (shown), and V7N V29N I290N (not shown) exhibit a reduced level of binding to HUVECs compared to either DT382 or DT389-IL2.

### Example 13

### Construction and Expression of Variant DT-IL2

[0336] In stage 4, one or more lead DT-IL2 variants is generated by fusion of the lead DT variant from stage 3 with the human-IL2 (2-133) gene from stage 2. Expression of the wild-type and lead DT-IL2 variant in E. coli follows conventional methods for, for example, DT-IL2 involving accumulation of protein aggregates in inclusion bodies and refolding. Wild-type and one or more lead DT-IL2 variants are then tested in the cytotoxicity and/or VLS-related assays as described in stage 1 and/or Example 6.

### Example 14

### Adjuvant Effect of DT Variant-IL2 Fusion Proteins

[0337] Clinical Trial Design and Patient Eligibility

[0338] Treatment of patients is performed following written informed consent as part of a protocol approved by an Institutional Review Board and the FDA. Patients with histologically confirmed metastatic RCC are eligible for study. All patients are required to have adequate hepatic, renal, and neurological function, a life expectancy of more than 6 months, and a Karnofsky performance status of greater than or equal to 70%. Patients are to have recovered from all toxicities related to any prior therapy and not received any chemotherapy, radiation therapy, or immunotherapy for at least 6 weeks prior to study entry. Excluded from this study are patients with CNS metastases, with a history of autoimmune disease, and with serious intercurrent chronic or acute illnesses. Patients on immunosuppressive agents are also excluded. Eligible subjects are randomized with equal probability to receive either a single dose of DT variant-IL2 fusion protein (18 μg/kg) followed by immunization with tumor RNA-transfected DCs or DT variant-IL2 fusion protein alone. All subjects receive 3 intradermal injections of tumor RNA-transfected DCs. The injections are administered intradermally at biweekly intervals and consist of 1×10⁷ cells suspended in 200 μl 0.9% sodium chloride at each injection. Following treatment, subjects are evaluated for clinical toxicity and immunological and clinical responses. Due to regulatory restrictions and, in some subjects, limited access to rumor tissue, no tumor biopsies are performed.

[0339] DT variant-IL2 Fusion Protein and Composition Preparation

[0340] DT variant-IL2 fusion protein is provided as a frozen, sterile solution formulated in citrate buffer in 2 ml single-use vials at a concentration of 150 μg/ml. After thawing, DT variant-IL2 fusion protein is diluted with sterile normal saline to a final concentration of 15 μg/ml and delivered by intravenous infusion over a 30-minute period. Patients are permitted to receive acetaminophen (600 mg) and antihistamines 30 to 60 minutes prior to infusion. For DC culture, a concentrated leukocyte fraction is harvested by leukapheresis. PBMCs are isolated from the leukapheresis product by density gradient centrifugation (Histopaque; Sigma-Aldrich). The semiadherent cell fraction is used for DC culture in serum-free X-VIVO 15 medium (Cambrex Corp.) supplemented with recombinant human IL-4 (500 U/ml; R&D Systems) and recombinant human GM-CSF (rhGM-CSF; 800 U/ml; Immunex Corp.). After 7 days, immature DCs are harvested and transfected with total RNA extracted from tumor tissues histologically classified as clear cell carcinoma. Control RNA used for immunological monitoring studies is isolated from autologous benign renal tissues (RE) or from PBMCs. Transfection of immature DCs is carried out by electroporation. DCs are washed in PBS and resuspended at a concentration of 4×10⁷ cells/ml in ViaSpan (Barr Laboratories). Cells are then co-incubated for 5 minutes with 5 μg RNA per 1×10⁶ cells and electroporated in 0.4 cm cuvettes via exponential decay delivery at 300 V and 150 μF (Gene Pulser II; Bio-Rad). After electroporation, cells are re-suspended in X-VIVO 15 medium and matured for 20 hours in the presence of 10 ng/ml TNF-α, 10 ng/ml IL-1, 150 ng/ml IL-6 (R&D Systems), and 1 μg/ml prostaglandin E₂ (PGE₂; Cayman Chemical Co.). Prior to administration, cells are characterized to ensure that they met the typical phenotype of fully mature DCs: Lin^{neg}, HLA class I and II^{high}, CD86^{high}, and CD83^{high}.

[0341] Evaluation of Immune Status

[0342] IFN-γ and IL-4 ELISPOT analyses are performed using PBMCs obtained prior to, during, and after immunization. PBMCs are cultured overnight in complete RPMI 1640 medium. CD4+ and CD8+ T cells are isolated from PBMCs by negative depletion (Miltenyi Biotec). After blocking, 1×10⁵ T cells and 1×10⁴ RNA-transfected DCs are added to each well of 96-well nitrocellulose plates (Multiscreen-IP; Millipore) precoated with 2 μg/ml IFN-, capture antibody (Pierce Biotechonology Inc.) or with IL4 capture antibody (BD Biosciences Pharmingen). Plates are incubated for 20 hours at 37° C., and biotinylated IFN-γ detection antibody (Pierce Biotechonology Inc.) or biotinylated IL-4 antibody (BD Biosciences Pharmingen) is added to each well. Cells are then incubated for an additional 2 hours at room temperature, then with streptavidin-alkaline phosphatase (1 μg/ml; Sigma-Aldrich) is added; plates are developed with substrate (KPL). After washing, spots are counted using an automated ELISPOT reader (Zeiss).

[0343] CTL assays are performed by co-culturing RNA-transfected DCs with autologous PBMCs. Cells are re-stimulated once, and IL-2 (20 units/ml) is added after 5 days and every other day thereafter. After 12 days of culture, effector cells are harvested. Target cells are labeled with 100 μCi of Na_{2[}51CrO₄] (PerkinElmer) in 200 μl of complete RPMI 1640 for 1 hour at 37° C. in 5% CO₂, and 51 Cr-labeled target cells are incubated in complete RPMI 1640 medium with effector cells for 5 hours at 37° C. Then 50 μl of supernatant is harvested, and release of ⁵¹Cr is measured with a. scintillation counter.

[0344] For proliferation assays, purified CD3+ T cells are seeded into round-bottomed microplates in the presence of mRNA-transfected DCs. T cells alone are used as the background control. After 4 days, 1 μCi of [methyl-3H] thyridine (PerkinElmer) is added to each well for an additional 16 hours. Incorporation of thymidine is determined using a liquid scintillation counter.

[0345] Cytotoxicity of DT variant-IL2 fusion protein is determined in MTT assays. After 6 hours incubation with varying concentrations of DT variant-IL2 fusion protein, cells are seeded in 96-well plates at a density of 5×10³ cells/well. After 48 hours of incubation, 20 μL MTT from a 5 mg/ml stock is added. After 4 hours, the formazan crystals are solubilized by adding 100 μl isopropanol/0.1 M hydrochloric acid. The absorbance of the formazan product is measured on an ELISA plate reader at 570 nm.

[0346] Cytokine secretion by vaccine-induced CD4+ T cells is measured using the human Th-1/Th-2 cytokine kit (Cytokine Bead Array; BD Biosciences Pharmingen) according to the manufacturer's instructions. Isolated CD4+ T cells are re-stimulated overnight with RNA-transfected DCs at a ratio of 10:1.

[0347] Four-color FACS analyses are performed using the following antibodies: anti-CD4 FITC, anti-CD45RO, anti-CD45RA (CALTAG Laboratories), anti-CD25 PE (BD Biosciences Pharmingen), and anti-GITR (R&D Systems) as well as isotypic controls (CALTAG Laboratories). Sorting of CD4+/CD25neg, CD4+/CD25+int and CD4+/CD25high T cells is performed using a BD FACSAria cell sorter after antibody labeling. For intracellular detection of FoxP3, cells are permeabilized with 30 μg/ml digitonin for 45 minutes at 4° C. Subsequently, cells are stained with anti-FoxP3 antibody (Abcam), and R-phycoerythrin anti-goat IgG in the presence of 10 μg/ml digitonin for 30 minutes 4° C. Following staining, cells are fixed analyzed by FACS. For intracellular CTLA-4 detection, T cells are permeabilized, fixed, and stained with biotinylated anti-CD152 (BD Biosciences Pharmingen) followed by APC-strepavidin (BD Biosciences Pharmingen). A total of 1×106 cells are suspended in staining buffer (PBS with 1% PCS, 2 mM EDTA, and 0.1% sodium aside) and incubated for 20 minutes at 4° C. with the antibody.

[0348] The suppressive activity of Tregs isolated from PBMCs of study subjects prior to and 4 days after DT variant-IL2fusion protein administration is analyzed as described previously (Tsaknaridis et al. 2003. J. Neurosci. Res. 74: 296-308). CD4+/CD25+ T cells are isolated from the PBMCs of study subjects using magnetic bead separation techniques. Cells are washed with PBS, re-suspended in complete RPMI 1640 medium, and placed into 96-well round bottom plates pre-coated with anti-CD3/CD28 antibodies (0.4 μg/well) (CALTAG Laboratories) CD4+/CD25− cells are plated at 2.0×10⁴/well alone or in combination with CD4+/CD25+ cells in triplicate wells at a ratio of 1:2 (CD4+/CD25:CD4+CD25⁺). On day 5, 1 μCi of 3H thymidine is added for the final 16 hours of the cultures. Cells are then harvested on glass fiber filters and assessed for uptake of radiolabeled thymidine.

[0349] Details of real-time PCR-based quantification of β-actin transcripts are previously described in the literature. FoxP3 mRNA transcripts are quantified using the Hs00203958 ml Taq-Man gene expression assay (Applied Biosystems) according to the protocol provided by the manufacturer. A plasmid containing the full-length FoxP3 insert is used to generate standard curves.

[0350] T cell analysis before and after treatment is performed by IFN-γ ELISPOT on all patients who completed immunotherapy. Increases of antigen-specific CD4+ and CD8+ T cells after immunization are compared using the Wilcoxon matched-pairs signed rank test, analyzing the null hypothesis that the rates of change in T cell response are equivalent prior to and after therapy. A 2-sided P value of less than 0.05 is considered statistically significant.

[0351] This invention may be embodied in other forms or carried out in other ways without departing from the spirit or essential characteristics thereof. The present disclosure is therefore to be considered as in all aspects illustrated and not restrictive, and all changes which come within the meaning and range of equivalency are intended to be embraced therein.

[0352] Various references are cited throughout this specification, each of which is incorporated herein by reference in its entirety.

What is claimed is:

1. A composition comprising a modified diphtheria toxin, said modified diphtheria toxin having one or more amino acid modifications therein, wherein:
at least one amino acid modification is made within an (x)D(y) motif;
said modified diphtheria toxin exhibits cytotoxicity comparable to an unmodified diphtheria toxin; and
a modification at position (x) is a substitution of V or I by an amino acid residue selected from among F, C, M, T, W, Y, P, H, E, Q, D, N, K, R, and a modified or unusual amino acid from Table 1; a modification at position D is a substitution of D by an amino acid residue selected from among I, V, L, F, C, M, A, G, T, W, Y, P, H, Q, N, K, R and a modified or unusual amino acid from Table 1; a modification at position (y) is a substitution of S by an amino acid residue selected from among I, F, C, M, A, G, T, W, Y, P, H, E, Q, D, N, K, R and a modified or unusual amino acid from Table 1; or a combination thereof.

2. The composition of claim 1, wherein said modified diphtheria toxin contains one or more modifications selected from among V7T, V7N, V7D, D8N, S9A, S9T, S9G, V28N, V28D, V28T, D29N, S30G, S30N, I290T, S292A, S292G and S292T.

3. The composition of claim 1, wherein said modified diphtheria toxin comprises two modifications selected from among V7N V28N, V7N V28T, V7N V28D, V7T V28N, V7T V28T and V7T V28D.

4. The composition of claim 1, wherein said modified diphtheria toxin comprises three modifications selected from among V7N V29N I290N, V7N V29N I290T, V7N V29N S292A, V7N V29N S292T, V7N V29T I290N, V7N V29T I290T, V7N V29T S292A, V7N V29T S292T, and V7T V29T I290T.

5. The composition of claim 1, wherein said unmodified diphtheria toxin has an amino acid sequence of SEQ ID NO: 1, 2 or 149.

6. The composition of claim 1, wherein said unmodified diphtheria toxin has an amino acid sequence of any one of SEQ ID NOS: 4-147.

7. The composition of claim 1, wherein said composition exhibits reduced binding activity to human vascular endothelial cells (HUVECs) compared to an unmodified diphtheria toxin.

8. The composition of claim 1, wherein said modified diphtheria toxin further comprises a non-diphtheria toxin polypeptide.

9. The composition of claim 8, wherein said non-diphtheria toxin polypeptide is among an antibody or antigen-binding fragment thereof, EGF, IL-1, IL-2, IL-3, IL-4, IL-5, IL-6, IL-7, IL-8, IL-9, IL-10, IL-11, IL-12, IL-13, IL-14, IL-15, INFα, INFγ, GM-CSF, G-CSF, M-CSF, TNF, VEGF, Ephrin, BFGF, TGF, or a cell-specific binding portion thereof.

10. The composition of claim 9, wherein said non-diphtheria toxin polypeptide is IL-2 or a cell-specific binding portion thereof.

11. The composition of claim 9, wherein said non-diphtheria toxin polypeptide is IL-3 or a cell-specific binding portion thereof.

12. A fusion protein comprising a polypeptide toxophore of a modified diphtheria toxin, and a non-diphtheria toxin polypeptide, said polypeptide toxophore comprising a diphtheria toxin having an amino acid sequence as recited in SEQ ID NO. 2 or 149 having one or more amino acid modifications therein, wherein:
at least one amino acid modification is made within an (x)D(y) motif;
said modified diphtheria toxin has cytotoxicity comparable to an unmodified diphtheria toxin; and
a modification at position (x) is a substitution of V or I by an amino acid residue selected from among F, C, M, T, W, Y, P, H, E, Q, D, N, K, R, and a modified or unusual amino acid from Table 1; a modification at position D is a substitution of D by an amino acid residue selected from among I, V, L, F, C, M, A, G, T, W, Y, P, H, Q, N, K, R and a modified or unusual amino acid from Table 1; a modification at position (y) is a substitution of S by an amino acid residue selected from among I, F, C, M, A, G, T, W, Y, P, H, E, Q, D, N, K, R and a modified or unusual amino acid from Table 1; or a combination thereof.

13. The fusion protein of claim 12, wherein said polypeptide toxophore has reduced binding to human vascular endothelial cells compared to a diphtheria toxin molecule having a sequence of SEQ ID NO: 1, 2 or 149.

14. The fusion protein of claim 12, wherein said non-diphtheria toxin polypeptide is an antibody or antigen-binding fragment thereof, EGF, IL-1, IL-2, IL-3, IL-4, IL-5, IL-6, IL-7, IL-8, IL-9, IL-10, IL-11, IL-12, IL-13, IL-14, IL-15, INFα; INFγ, GM-CSF, G-CSF, M-CSF, TNF, VEGF, Ephrin, BFGF, TGF, or a cell-binding portion thereof.

15. The fusion protein of claim 14, wherein said non-diphtheria toxin polypeptide is IL-2 or a cell binding portion thereof.

16. The fusion protein of claim 14, wherein said non-diphtheria toxin polypeptide is IL-3 or a cell binding portion thereof.

17. The fusion protein of claim 12, further comprising a pharmaceutically acceptable carrier or excipient.

18. A method for treating a malignant disease in a subject comprising administering a therapeutically effective amount of a composition of claim 17 to said subject, wherein said malignant disease is a blood cancer, a solid tumor or a metastasis.

19. A method for treating a non-malignant disease in a subject comprising administering a therapeutically effective amount of a composition of claim 17 to said subject, wherein said non-malignant disease is graft versus host disease or psoriasis.

20. A method for enhancing the activity of an anti-cancer agent comprising administering an anti-cancer agent and a composition of claim 17 to a subject.

21. A method for treating a malignant disease in a subject comprising administering a therapeutically effective amount of a composition of claim 17 and an anti-cancer agent to said subject, wherein said malignant disease is a blood cancer, a solid tumor or a metastasis.

The application's sequence listing, which the Patent Office published only in electronic form, follows.

SEQUENCE LISTING (276 sequences)

SEQ ID NO: 1 - protein, 535 aa, Corynebacterium diphtheriae
GADDVVDSSKSFVMENFSSYHGTKPGYVDSIQKGIQKPKSGTQGNYDDDWKGFYSTDNKYDAAGYSVDNENPLSGKAGGVVKVTYPGLTKVLALKVDNAETIKKELGLSLTEPLMEQVGTEEFIKRFGDGASRVVLSLPFAEGSSSVEYINNWEQAKALSVELEINFETRGKRGQDAMYEYMAQACAGNRVRRSVGSSLSCINLDWDVIRDKTKTKIESLKEHGPIKNKMSESPNKTVSEEKAKQYLEEFHQTALEHPELSELKTVTGTNPVFAGANYAAWAVNVAQVIDSETADNLEKTTAALSILPGIGSVMGIADGAVHHNTEEIVAQSIALSSLMVAQAIPLVGELVDIGFAAYNFVESIINLFQVVHNSYNRPAYSPGHKTQPFLHDGYAVSWNTVEDSIIRTGFQGESGHDIKITAENTPLPIAGVLLPTIPGKLDVNKSKTHISVNGRKIRMRCRAIDGDVTFCRPKSPVYVGNGVHANLHVAFHRSSSEKIHSNEISSDSIGVLGYQKTVDHTKVNSKLSLFFEIKS

SEQ ID NO: 2 - protein, 387 aa, Artificial Sequence
  Description of Artificial Sequence: Synthetic polypeptide
MGADDVVDSSKSFVMENFSSYHGTKPGYVDSIQKGIQKPKSGTQGNYDDDWKGFYSTDNKYDAAGYSVDNENPLSGKAGGVVKVTYPGLTKVLALKVDNAETIKKELGLSLTEPLMEQVGTEEFIKRFGDGASRVVLSLPFAEGSSSVEYINNWEQAKALSVELEINFETRGKRGQDAMYEYMAQACAGNRVRRSVGSSLSCINLDWDVIRDKTKTKIESLKEHGPIKNKMSESPNKTVSEEKAKQYLEEFHQTALEHPELSELKTVTGTNPVFAGANYAAWAVNVAQVIDSETADNLEKTTAALSILPGIGSVMGIADGAVHHNTEEIVAQSIALSSLMVAQAIPLVGELVDIGFAAYNFVESIINLFQVVHNSYNRPAYSPGHKT

SEQ ID NO: 3 - protein, 133 aa, Artificial Sequence
  Description of Artificial Sequence: Synthetic polypeptide
APTSSSTKKTQLQLEHLLLDLQMILNGINNYKNPKLTRMLTAKFYMPKKATELKHLQCLEEELKPLEEVLNLAQSKNFHLRPRDLISNINVIVLELKGSETTFMCEYADETATIVEFLNRWITFCQSIISTLT

SEQ ID NO: 4 - protein, 387 aa, Artificial Sequence
  Description of Artificial Sequence: Synthetic polypeptide
MGADDVFDSSKSFVMENFSSYHGTKPGYVDSIQKGIQKPKSGTQGNYDDDWKGFYSTDNKYDAAGYSVDNENPLSGKAGGVVKVTYPGLTKVLALKVDNAETIKKELGLSLTEPLMEQVGTEEFIKRFGDGASRVVLSLPFAEGSSSVEYINNWEQAKALSVELEINFETRGKRGQDAMYEYMAQACAGNRVRRSVGSSLSCINLDWDVIRDKTKTKIESLKEHGPIKNKMSESPNKTVSEEKAKQYLEEFHQTALEHPELSELKTVTGTNPVFAGANYAAWAVNVAQVIDSETADNLEKTTAALSILPGIGSVMGIADGAVHHNTEEIVAQSIALSSLMVAQAIPLVGELVDIGFAAYNFVESIINLFQVVHNSYNRPAYSPGHKT

SEQ ID NO: 5 - protein, 387 aa, Artificial Sequence
  Description of Artificial Sequence: Synthetic polypeptide
MGADDVCDSSKSFVMENFSSYHGTKPGYVDSIQKGIQKPKSGTQGNYDDDWKGFYSTDNKYDAAGYSVDNENPLSGKAGGVVKVTYPGLTKVLALKVDNAETIKKELGLSLTEPLMEQVGTEEFIKRFGDGASRVVLSLPFAEGSSSVEYINNWEQAKALSVELEINFETRGKRGQDAMYEYMAQACAGNRVRRSVGSSLSCINLDWDVIRDKTKTKIESLKEHGPIKNKMSESPNKTVSEEKAKQYLEEFHQTALEHPELSELKTVTGTNPVFAGANYAAWAVNVAQVIDSETADNLEKTTAALSILPGIGSVMGIADGAVHHNTEEIVAQSIALSSLMVAQAIPLVGELVDIGFAAYNFVESIINLFQVVHNSYNRPAYSPGHKT

SEQ ID NO: 6 - protein, 387 aa, Artificial Sequence
  Description of Artificial Sequence: Synthetic polypeptide
MGADDVMDSSKSFVMENFSSYHGTKPGYVDSIQKGIQKPKSGTQGNYDDDWKGFYSTDNKYDAAGYSVDNENPLSGKAGGVVKVTYPGLTKVLALKVDNAETIKKELGLSLTEPLMEQVGTEEFIKRFGDGASRVVLSLPFAEGSSSVEYINNWEQAKALSVELEINFETRGKRGQDAMYEYMAQACAGNRVRRSVGSSLSCINLDWDVIRDKTKTKIESLKEHGPIKNKMSESPNKTVSEEKAKQYLEEFHQTALEHPELSELKTVTGTNPVFAGANYAAWAVNVAQVIDSETADNLEKTTAALSILPGIGSVMGIADGAVHHNTEEIVAQSIALSSLMVAQAIPLVGELVDIGFAAYNFVESIINLFQVVHNSYNRPAYSPGHKT

SEQ ID NO: 7 - protein, 387 aa, Artificial Sequence
  Description of Artificial Sequence: Synthetic polypeptide
MGADDVTDSSKSFVMENFSSYHGTKPGYVDSIQKGIQKPKSGTQGNYDDDWKGFYSTDNKYDAAGYSVDNENPLSGKAGGVVKVTYPGLTKVLALKVDNAETIKKELGLSLTEPLMEQVGTEEFIKRFGDGASRVVLSLPFAEGSSSVEYINNWEQAKALSVELEINFETRGKRGQDAMYEYMAQACAGNRVRRSVGSSLSCINLDWDVIRDKTKTKIESLKEHGPIKNKMSESPNKTVSEEKAKQYLEEFHQTALEHPELSELKTVTGTNPVFAGANYAAWAVNVAQVIDSETADNLEKTTAALSILPGIGSVMGIADGAVHHNTEEIVAQSIALSSLMVAQAIPLVGELVDIGFAAYNFVESIINLFQVVHNSYNRPAYSPGHKT

SEQ ID NO: 8 - protein, 387 aa, Artificial Sequence
  Description of Artificial Sequence: Synthetic polypeptide
MGADDVWDSSKSFVMENFSSYHGTKPGYVDSIQKGIQKPKSGTQGNYDDDWKGFYSTDNKYDAAGYSVDNENPLSGKAGGVVKVTYPGLTKVLALKVDNAETIKKELGLSLTEPLMEQVGTEEFIKRFGDGASRVVLSLPFAEGSSSVEYINNWEQAKALSVELEINFETRGKRGQDAMYEYMAQACAGNRVRRSVGSSLSCINLDWDVIRDKTKTKIESLKEHGPIKNKMSESPNKTVSEEKAKQYLEEFHQTALEHPELSELKTVTGTNPVFAGANYAAWAVNVAQVIDSETADNLEKTTAALSILPGIGSVMGIADGAVHHNTEEIVAQSIALSSLMVAQAIPLVGELVDIGFAAYNFVESIINLFQVVHNSYNRPAYSPGHKT

SEQ ID NO: 9 - protein, 387 aa, Artificial Sequence
  Description of Artificial Sequence: Synthetic polypeptide
MGADDVYDSSKSFVMENFSSYHGTKPGYVDSIQKGIQKPKSGTQGNYDDDWKGFYSTDNKYDAAGYSVDNENPLSGKAGGVVKVTYPGLTKVLALKVDNAETIKKELGLSLTEPLMEQVGTEEFIKRFGDGASRVVLSLPFAEGSSSVEYINNWEQAKALSVELEINFETRGKRGQDAMYEYMAQACAGNRVRRSVGSSLSCINLDWDVIRDKTKTKIESLKEHGPIKNKMSESPNKTVSEEKAKQYLEEFHQTALEHPELSELKTVTGTNPVFAGANYAAWAVNVAQVIDSETADNLEKTTAALSILPGIGSVMGIADGAVHHNTEEIVAQSIALSSLMVAQAIPLVGELVDIGFAAYNFVESIINLFQVVHNSYNRPAYSPGHKT

SEQ ID NO: 10 - protein, 387 aa, Artificial Sequence
  Description of Artificial Sequence: Synthetic polypeptide
MGADDVPDSSKSFVMENFSSYHGTKPGYVDSIQKGIQKPKSGTQGNYDDDWKGFYSTDNKYDAAGYSVDNENPLSGKAGGVVKVTYPGLTKVLALKVDNAETIKKELGLSLTEPLMEQVGTEEFIKRFGDGASRVVLSLPFAEGSSSVEYINNWEQAKALSVELEINFETRGKRGQDAMYEYMAQACAGNRVRRSVGSSLSCINLDWDVIRDKTKTKIESLKEHGPIKNKMSESPNKTVSEEKAKQYLEEFHQTALEHPELSELKTVTGTNPVFAGANYAAWAVNVAQVIDSETADNLEKTTAALSILPGIGSVMGIADGAVHHNTEEIVAQSIALSSLMVAQAIPLVGELVDIGFAAYNFVESIINLFQVVHNSYNRPAYSPGHKT

SEQ ID NO: 11 - protein, 387 aa, Artificial Sequence
  Description of Artificial Sequence: Synthetic polypeptide
MGADDVHDSSKSFVMENFSSYHGTKPGYVDSIQKGIQKPKSGTQGNYDDDWKGFYSTDNKYDAAGYSVDNENPLSGKAGGVVKVTYPGLTKVLALKVDNAETIKKELGLSLTEPLMEQVGTEEFIKRFGDGASRVVLSLPFAEGSSSVEYINNWEQAKALSVELEINFETRGKRGQDAMYEYMAQACAGNRVRRSVGSSLSCINLDWDVIRDKTKTKIESLKEHGPIKNKMSESPNKTVSEEKAKQYLEEFHQTALEHPELSELKTVTGTNPVFAGANYAAWAVNVAQVIDSETADNLEKTTAALSILPGIGSVMGIADGAVHHNTEEIVAQSIALSSLMVAQAIPLVGELVDIGFAAYNFVESIINLFQVVHNSYNRPAYSPGHKT

SEQ ID NO: 12 - protein, 387 aa, Artificial Sequence
  Description of Artificial Sequence: Synthetic polypeptide
MGADDVEDSSKSFVMENFSSYHGTKPGYVDSIQKGIQKPKSGTQGNYDDDWKGFYSTDNKYDAAGYSVDNENPLSGKAGGVVKVTYPGLTKVLALKVDNAETIKKELGLSLTEPLMEQVGTEEFIKRFGDGASRVVLSLPFAEGSSSVEYINNWEQAKALSVELEINFETRGKRGQDAMYEYMAQACAGNRVRRSVGSSLSCINLDWDVIRDKTKTKIESLKEHGPIKNKMSESPNKTVSEEKAKQYLEEFHQTALEHPELSELKTVTGTNPVFAGANYAAWAVNVAQVIDSETADNLEKTTAALSILPGIGSVMGIADGAVHHNTEEIVAQSIALSSLMVAQAIPLVGELVDIGFAAYNFVESIINLFQVVHNSYNRPAYSPGHKT

SEQ ID NO: 13 - protein, 387 aa, Artificial Sequence
  Description of Artificial Sequence: Synthetic polypeptide
MGADDVQDSSKSFVMENFSSYHGTKPGYVDSIQKGIQKPKSGTQGNYDDDWKGFYSTDNKYDAAGYSVDNENPLSGKAGGVVKVTYPGLTKVLALKVDNAETIKKELGLSLTEPLMEQVGTEEFIKRFGDGASRVVLSLPFAEGSSSVEYINNWEQAKALSVELEINFETRGKRGQDAMYEYMAQACAGNRVRRSVGSSLSCINLDWDVIRDKTKTKIESLKEHGPIKNKMSESPNKTVSEEKAKQYLEEFHQTALEHPELSELKTVTGTNPVFAGANYAAWAVNVAQVIDSETADNLEKTTAALSILPGIGSVMGIADGAVHHNTEEIVAQSIALSSLMVAQAIPLVGELVDIGFAAYNFVESIINLFQVVHNSYNRPAYSPGHKT

SEQ ID NO: 14 - protein, 387 aa, Artificial Sequence
  Description of Artificial Sequence: Synthetic polypeptide
MGADDVDDSSKSFVMENFSSYHGTKPGYVDSIQKGIQKPKSGTQGNYDDDWKGFYSTDNKYDAAGYSVDNENPLSGKAGGVVKVTYPGLTKVLALKVDNAETIKKELGLSLTEPLMEQVGTEEFIKRFGDGASRVVLSLPFAEGSSSVEYINNWEQAKALSVELEINFETRGKRGQDAMYEYMAQACAGNRVRRSVGSSLSCINLDWDVIRDKTKTKIESLKEHGPIKNKMSESPNKTVSEEKAKQYLEEFHQTALEHPELSELKTVTGTNPVFAGANYAAWAVNVAQVIDSETADNLEKTTAALSILPGIGSVMGIADGAVHHNTEEIVAQSIALSSLMVAQAIPLVGELVDIGFAAYNFVESIINLFQVVHNSYNRPAYSPGHKT

SEQ ID NO: 15 - protein, 387 aa, Artificial Sequence
  Description of Artificial Sequence: Synthetic polypeptide
MGADDVNDSSKSFVMENFSSYHGTKPGYVDSIQKGIQKPKSGTQGNYDDDWKGFYSTDNKYDAAGYSVDNENPLSGKAGGVVKVTYPGLTKVLALKVDNAETIKKELGLSLTEPLMEQVGTEEFIKRFGDGASRVVLSLPFAEGSSSVEYINNWEQAKALSVELEINFETRGKRGQDAMYEYMAQACAGNRVRRSVGSSLSCINLDWDVIRDKTKTKIESLKEHGPIKNKMSESPNKTVSEEKAKQYLEEFHQTALEHPELSELKTVTGTNPVFAGANYAAWAVNVAQVIDSETADNLEKTTAALSILPGIGSVMGIADGAVHHNTEEIVAQSIALSSLMVAQAIPLVGELVDIGFAAYNFVESIINLFQVVHNSYNRPAYSPGHKT

SEQ ID NO: 16 - protein, 387 aa, Artificial Sequence
  Description of Artificial Sequence: Synthetic polypeptide
MGADDVKDSSKSFVMENFSSYHGTKPGYVDSIQKGIQKPKSGTQGNYDDDWKGFYSTDNKYDAAGYSVDNENPLSGKAGGVVKVTYPGLTKVLALKVDNAETIKKELGLSLTEPLMEQVGTEEFIKRFGDGASRVVLSLPFAEGSSSVEYINNWEQAKALSVELEINFETRGKRGQDAMYEYMAQACAGNRVRRSVGSSLSCINLDWDVIRDKTKTKIESLKEHGPIKNKMSESPNKTVSEEKAKQYLEEFHQTALEHPELSELKTVTGTNPVFAGANYAAWAVNVAQVIDSETADNLEKTTAALSILPGIGSVMGIADGAVHHNTEEIVAQSIALSSLMVAQAIPLVGELVDIGFAAYNFVESIINLFQVVHNSYNRPAYSPGHKT

SEQ ID NO: 17 - protein, 387 aa, Artificial Sequence
  Description of Artificial Sequence: Synthetic polypeptide
MGADDVRDSSKSFVMENFSSYHGTKPGYVDSIQKGIQKPKSGTQGNYDDDWKGFYSTDNKYDAAGYSVDNENPLSGKAGGVVKVTYPGLTKVLALKVDNAETIKKELGLSLTEPLMEQVGTEEFIKRFGDGASRVVLSLPFAEGSSSVEYINNWEQAKALSVELEINFETRGKRGQDAMYEYMAQACAGNRVRRSVGSSLSCINLDWDVIRDKTKTKIESLKEHGPIKNKMSESPNKTVSEEKAKQYLEEFHQTALEHPELSELKTVTGTNPVFAGANYAAWAVNVAQVIDSETADNLEKTTAALSILPGIGSVMGIADGAVHHNTEEIVAQSIALSSLMVAQAIPLVGELVDIGFAAYNFVESIINLFQVVHNSYNRPAYSPGHKT

SEQ ID NO: 18 - protein, 387 aa, Artificial Sequence
  Description of Artificial Sequence: Synthetic polypeptide
MGADDVVISSKSFVMENFSSYHGTKPGYVDSIQKGIQKPKSGTQGNYDDDWKGFYSTDNKYDAAGYSVDNENPLSGKAGGVVKVTYPGLTKVLALKVDNAETIKKELGLSLTEPLMEQVGTEEFIKRFGDGASRVVLSLPFAEGSSSVEYINNWEQAKALSVELEINFETRGKRGQDAMYEYMAQACAGNRVRRSVGSSLSCINLDWDVIRDKTKTKIESLKEHGPIKNKMSESPNKTVSEEKAKQYLEEFHQTALEHPELSELKTVTGTNPVFAGANYAAWAVNVAQVIDSETADNLEKTTAALSILPGIGSVMGIADGAVHHNTEEIVAQSIALSSLMVAQAIPLVGELVDIGFAAYNFVESIINLFQVVHNSYNRPAYSPGHKT

SEQ ID NO: 19 - protein, 387 aa, Artificial Sequence
  Description of Artificial Sequence: Synthetic polypeptide
MGADDVVVSSKSFVMENFSSYHGTKPGYVDSIQKGIQKPKSGTQGNYDDDWKGFYSTDNKYDAAGYSVDNENPLSGKAGGVVKVTYPGLTKVLALKVDNAETIKKELGLSLTEPLMEQVGTEEFIKRFGDGASRVVLSLPFAEGSSSVEYINNWEQAKALSVELEINFETRGKRGQDAMYEYMAQACAGNRVRRSVGSSLSCINLDWDVIRDKTKTKIESLKEHGPIKNKMSESPNKTVSEEKAKQYLEEFHQTALEHPELSELKTVTGTNPVFAGANYAAWAVNVAQVIDSETADNLEKTTAALSILPGIGSVMGIADGAVHHNTEEIVAQSIALSSLMVAQAIPLVGELVDIGFAAYNFVESIINLFQVVHNSYNRPAYSPGHKT

SEQ ID NO: 20 - protein, 387 aa, Artificial Sequence
  Description of Artificial Sequence: Synthetic polypeptide
MGADDVVLSSKSFVMENFSSYHGTKPGYVDSIQKGIQKPKSGTQGNYDDDWKGFYSTDNKYDAAGYSVDNENPLSGKAGGVVKVTYPGLTKVLALKVDNAETIKKELGLSLTEPLMEQVGTEEFIKRFGDGASRVVLSLPFAEGSSSVEYINNWEQAKALSVELEINFETRGKRGQDAMYEYMAQACAGNRVRRSVGSSLSCINLDWDVIRDKTKTKIESLKEHGPIKNKMSESPNKTVSEEKAKQYLEEFHQTALEHPELSELKTVTGTNPVFAGANYAAWAVNVAQVIDSETADNLEKTTAALSILPGIGSVMGIADGAVHHNTEEIVAQSIALSSLMVAQAIPLVGELVDIGFAAYNFVESIINLFQVVHNSYNRPAYSPGHKT

SEQ ID NO: 21 - protein, 387 aa, Artificial Sequence
  Description of Artificial Sequence: Synthetic polypeptide
MGADDVVFSSKSFVMENFSSYHGTKPGYVDSIQKGIQKPKSGTQGNYDDDWKGFYSTDNKYDAAGYSVDNENPLSGKAGGVVKVTYPGLTKVLALKVDNAETIKKELGLSLTEPLMEQVGTEEFIKRFGDGASRVVLSLPFAEGSSSVEYINNWEQAKALSVELEINFETRGKRGQDAMYEYMAQACAGNRVRRSVGSSLSCINLDWDVIRDKTKTKIESLKEHGPIKNKMSESPNKTVSEEKAKQYLEEFHQTALEHPELSELKTVTGTNPVFAGANYAAWAVNVAQVIDSETADNLEKTTAALSILPGIGSVMGIADGAVHHNTEEIVAQSIALSSLMVAQAIPLVGELVDIGFAAYNFVESIINLFQVVHNSYNRPAYSPGHKT

SEQ ID NO: 22 - protein, 387 aa, Artificial Sequence
  Description of Artificial Sequence: Synthetic polypeptide
MGADDVVCSSKSFVMENFSSYHGTKPGYVDSIQKGIQKPKSGTQGNYDDDWKGFYSTDNKYDAAGYSVDNENPLSGKAGGVVKVTYPGLTKVLALKVDNAETIKKELGLSLTEPLMEQVGTEEFIKRFGDGASRVVLSLPFAEGSSSVEYINNWEQAKALSVELEINFETRGKRGQDAMYEYMAQACAGNRVRRSVGSSLSCINLDWDVIRDKTKTKIESLKEHGPIKNKMSESPNKTVSEEKAKQYLEEFHQTALEHPELSELKTVTGTNPVFAGANYAAWAVNVAQVIDSETADNLEKTTAALSILPGIGSVMGIADGAVHHNTEEIVAQSIALSSLMVAQAIPLVGELVDIGFAAYNFVESIINLFQVVHNSYNRPAYSPGHKT

SEQ ID NO: 23 - protein, 387 aa, Artificial Sequence
  Description of Artificial Sequence: Synthetic polypeptide
MGADDVVMSSKSFVMENFSSYHGTKPGYVDSIQKGIQKPKSGTQGNYDDDWKGFYSTDNKYDAAGYSVDNENPLSGKAGGVVKVTYPGLTKVLALKVDNAETIKKELGLSLTEPLMEQVGTEEFIKRFGDGASRVVLSLPFAEGSSSVEYINNWEQAKALSVELEINFETRGKRGQDAMYEYMAQACAGNRVRRSVGSSLSCINLDWDVIRDKTKTKIESLKEHGPIKNKMSESPNKTVSEEKAKQYLEEFHQTALEHPELSELKTVTGTNPVFAGANYAAWAVNVAQVIDSETADNLEKTTAALSILPGIGSVMGIADGAVHHNTEEIVAQSIALSSLMVAQAIPLVGELVDIGFAAYNFVESIINLFQVVHNSYNRPAYSPGHKT

SEQ ID NO: 24 - protein, 387 aa, Artificial Sequence
  Description of Artificial Sequence: Synthetic polypeptide
MGADDVVASSKSFVMENFSSYHGTKPGYVDSIQKGIQKPKSGTQGNYDDDWKGFYSTDNKYDAAGYSVDNENPLSGKAGGVVKVTYPGLTKVLALKVDNAETIKKELGLSLTEPLMEQVGTEEFIKRFGDGASRVVLSLPFAEGSSSVEYINNWEQAKALSVELEINFETRGKRGQDAMYEYMAQACAGNRVRRSVGSSLSCINLDWDVIRDKTKTKIESLKEHGPIKNKMSESPNKTVSEEKAKQYLEEFHQTALEHPELSELKTVTGTNPVFAGANYAAWAVNVAQVIDSETADNLEKTTAALSILPGIGSVMGIADGAVHHNTEEIVAQSIALSSLMVAQAIPLVGELVDIGFAAYNFVESIINLFQVVHNSYNRPAYSPGHKT

SEQ ID NO: 25 - protein, 387 aa, Artificial Sequence
  Description of Artificial Sequence: Synthetic polypeptide
MGADDVVGSSKSFVMENFSSYHGTKPGYVDSIQKGIQKPKSGTQGNYDDDWKGFYSTDNKYDAAGYSVDNENPLSGKAGGVVKVTYPGLTKVLALKVDNAETIKKELGLSLTEPLMEQVGTEEFIKRFGDGASRVVLSLPFAEGSSSVEYINNWEQAKALSVELEINFETRGKRGQDAMYEYMAQACAGNRVRRSVGSSLSCINLDWDVIRDKTKTKIESLKEHGPIKNKMSESPNKTVSEEKAKQYLEEFHQTALEHPELSELKTVTGTNPVFAGANYAAWAVNVAQVIDSETADNLEKTTAALSILPGIGSVMGIADGAVHHNTEEIVAQSIALSSLMVAQAIPLVGELVDIGFAAYNFVESIINLFQVVHNSYNRPAYSPGHKT

SEQ ID NO: 26 - protein, 387 aa, Artificial Sequence
  Description of Artificial Sequence: Synthetic polypeptide
MGADDVVTSSKSFVMENFSSYHGTKPGYVDSIQKGIQKPKSGTQGNYDDDWKGFYSTDNKYDAAGYSVDNENPLSGKAGGVVKVTYPGLTKVLALKVDNAETIKKELGLSLTEPLMEQVGTEEFIKRFGDGASRVVLSLPFAEGSSSVEYINNWEQAKALSVELEINFETRGKRGQDAMYEYMAQACAGNRVRRSVGSSLSCINLDWDVIRDKTKTKIESLKEHGPIKNKMSESPNKTVSEEKAKQYLEEFHQTALEHPELSELKTVTGTNPVFAGANYAAWAVNVAQVIDSETADNLEKTTAALSILPGIGSVMGIADGAVHHNTEEIVAQSIALSSLMVAQAIPLVGELVDIGFAAYNFVESIINLFQVVHNSYNRPAYSPGHKT

SEQ ID NO: 27 - protein, 387 aa, Artificial Sequence
  Description of Artificial Sequence: Synthetic polypeptide
MGADDVVWSSKSFVMENFSSYHGTKPGYVDSIQKGIQKPKSGTQGNYDDDWKGFYSTDNKYDAAGYSVDNENPLSGKAGGVVKVTYPGLTKVLALKVDNAETIKKELGLSLTEPLMEQVGTEEFIKRFGDGASRVVLSLPFAEGSSSVEYINNWEQAKALSVELEINFETRGKRGQDAMYEYMAQACAGNRVRRSVGSSLSCINLDWDVIRDKTKTKIESLKEHGPIKNKMSESPNKTVSEEKAKQYLEEFHQTALEHPELSELKTVTGTNPVFAGANYAAWAVNVAQVIDSETADNLEKTTAALSILPGIGSVMGIADGAVHHNTEEIVAQSIALSSLMVAQAIPLVGELVDIGFAAYNFVESIINLFQVVHNSYNRPAYSPGHKT

SEQ ID NO: 28 - protein, 387 aa, Artificial Sequence
  Description of Artificial Sequence: Synthetic polypeptide
MGADDVVYSSKSFVMENFSSYHGTKPGYVDSIQKGIQKPKSGTQGNYDDDWKGFYSTDNKYDAAGYSVDNENPLSGKAGGVVKVTYPGLTKVLALKVDNAETIKKELGLSLTEPLMEQVGTEEFIKRFGDGASRVVLSLPFAEGSSSVEYINNWEQAKALSVELEINFETRGKRGQDAMYEYMAQACAGNRVRRSVGSSLSCINLDWDVIRDKTKTKIESLKEHGPIKNKMSESPNKTVSEEKAKQYLEEFHQTALEHPELSELKTVTGTNPVFAGANYAAWAVNVAQVIDSETADNLEKTTAALSILPGIGSVMGIADGAVHHNTEEIVAQSIALSSLMVAQAIPLVGELVDIGFAAYNFVESIINLFQVVHNSYNRPAYSPGHKT

SEQ ID NO: 29 - protein, 387 aa, Artificial Sequence
  Description of Artificial Sequence: Synthetic polypeptide
MGADDVVPSSKSFVMENFSSYHGTKPGYVDSIQKGIQKPKSGTQGNYDDDWKGFYSTDNKYDAAGYSVDNENPLSGKAGGVVKVTYPGLTKVLALKVDNAETIKKELGLSLTEPLMEQVGTEEFIKRFGDGASRVVLSLPFAEGSSSVEYINNWEQAKALSVELEINFETRGKRGQDAMYEYMAQACAGNRVRRSVGSSLSCINLDWDVIRDKTKTKIESLKEHGPIKNKMSESPNKTVSEEKAKQYLEEFHQTALEHPELSELKTVTGTNPVFAGANYAAWAVNVAQVIDSETADNLEKTTAALSILPGIGSVMGIADGAVHHNTEEIVAQSIALSSLMVAQAIPLVGELVDIGFAAYNFVESIINLFQVVHNSYNRPAYSPGHKT

SEQ ID NO: 30 - protein, 387 aa, Artificial Sequence
  Description of Artificial Sequence: Synthetic polypeptide
MGADDVVHSSKSFVMENFSSYHGTKPGYVDSIQKGIQKPKSGTQGNYDDDWKGFYSTDNKYDAAGYSVDNENPLSGKAGGVVKVTYPGLTKVLALKVDNAETIKKELGLSLTEPLMEQVGTEEFIKRFGDGASRVVLSLPFAEGSSSVEYINNWEQAKALSVELEINFETRGKRGQDAMYEYMAQACAGNRVRRSVGSSLSCINLDWDVIRDKTKTKIESLKEHGPIKNKMSESPNKTVSEEKAKQYLEEFHQTALEHPELSELKTVTGTNPVFAGANYAAWAVNVAQVIDSETADNLEKTTAALSILPGIGSVMGIADGAVHHNTEEIVAQSIALSSLMVAQAIPLVGELVDIGFAAYNFVESIINLFQVVHNSYNRPAYSPGHKT

SEQ ID NO: 31 - protein, 387 aa, Artificial Sequence
  Description of Artificial Sequence: Synthetic polypeptide
MGADDVVQSSKSFVMENFSSYHGTKPGYVDSIQKGIQKPKSGTQGNYDDDWKGFYSTDNKYDAAGYSVDNENPLSGKAGGVVKVTYPGLTKVLALKVDNAETIKKELGLSLTEPLMEQVGTEEFIKRFGDGASRVVLSLPFAEGSSSVEYINNWEQAKALSVELEINFETRGKRGQDAMYEYMAQACAGNRVRRSVGSSLSCINLDWDVIRDKTKTKIESLKEHGPIKNKMSESPNKTVSEEKAKQYLEEFHQTALEHPELSELKTVTGTNPVFAGANYAAWAVNVAQVIDSETADNLEKTTAALSILPGIGSVMGIADGAVHHNTEEIVAQSIALSSLMVAQAIPLVGELVDIGFAAYNFVESIINLFQVVHNSYNRPAYSPGHKT

SEQ ID NO: 32 - protein, 387 aa, Artificial Sequence
  Description of Artificial Sequence: Synthetic polypeptide
MGADDVVNSSKSFVMENFSSYHGTKPGYVDSIQKGIQKPKSGTQGNYDDDWKGFYSTDNKYDAAGYSVDNENPLSGKAGGVVKVTYPGLTKVLALKVDNAETIKKELGLSLTEPLMEQVGTEEFIKRFGDGASRVVLSLPFAEGSSSVEYINNWEQAKALSVELEINFETRGKRGQDAMYEYMAQACAGNRVRRSVGSSLSCINLDWDVIRDKTKTKIESLKEHGPIKNKMSESPNKTVSEEKAKQYLEEFHQTALEHPELSELKTVTGTNPVFAGANYAAWAVNVAQVIDSETADNLEKTTAALSILPGIGSVMGIADGAVHHNTEEIVAQSIALSSLMVAQAIPLVGELVDIGFAAYNFVESIINLFQVVHNSYNRPAYSPGHKT

SEQ ID NO: 33 - protein, 387 aa, Artificial Sequence
  Description of Artificial Sequence: Synthetic polypeptide
MGADDVVKSSKSFVMENFSSYHGTKPGYVDSIQKGIQKPKSGTQGNYDDDWKGFYSTDNKYDAAGYSVDNENPLSGKAGGVVKVTYPGLTKVLALKVDNAETIKKELGLSLTEPLMEQVGTEEFIKRFGDGASRVVLSLPFAEGSSSVEYINNWEQAKALSVELEINFETRGKRGQDAMYEYMAQACAGNRVRRSVGSSLSCINLDWDVIRDKTKTKIESLKEHGPIKNKMSESPNKTVSEEKAKQYLEEFHQTALEHPELSELKTVTGTNPVFAGANYAAWAVNVAQVIDSETADNLEKTTAALSILPGIGSVMGIADGAVHHNTEEIVAQSIALSSLMVAQAIPLVGELVDIGFAAYNFVESIINLFQVVHNSYNRPAYSPGHKT

SEQ ID NO: 34 - protein, 387 aa, Artificial Sequence
  Description of Artificial Sequence: Synthetic polypeptide
MGADDVVRSSKSFVMENFSSYHGTKPGYVDSIQKGIQKPKSGTQGNYDDDWKGFYSTDNKYDAAGYSVDNENPLSGKAGGVVKVTYPGLTKVLALKVDNAETIKKELGLSLTEPLMEQVGTEEFIKRFGDGASRVVLSLPFAEGSSSVEYINNWEQAKALSVELEINFETRGKRGQDAMYEYMAQACAGNRVRRSVGSSLSCINLDWDVIRDKTKTKIESLKEHGPIKNKMSESPNKTVSEEKAKQYLEEFHQTALEHPELSELKTVTGTNPVFAGANYAAWAVNVAQVIDSETADNLEKTTAALSILPGIGSVMGIADGAVHHNTEEIVAQSIALSSLMVAQAIPLVGELVDIGFAAYNFVESIINLFQVVHNSYNRPAYSPGHKT

SEQ ID NO: 35 - protein, 387 aa, Artificial Sequence
  Description of Artificial Sequence: Synthetic polypeptide
MGADDVVDISKSFVMENFSSYHGTKPGYVDSIQKGIQKPKSGTQGNYDDDWKGFYSTDNKYDAAGYSVDNENPLSGKAGGVVKVTYPGLTKVLALKVDNAETIKKELGLSLTEPLMEQVGTEEFIKRFGDGASRVVLSLPFAEGSSSVEYINNWEQAKALSVELEINFETRGKRGQDAMYEYMAQACAGNRVRRSVGSSLSCINLDWDVIRDKTKTKIESLKEHGPIKNKMSESPNKTVSEEKAKQYLEEFHQTALEHPELSELKTVTGTNPVFAGANYAAWAVNVAQVIDSETADNLEKTTAALSILPGIGSVMGIADGAVHHNTEEIVAQSIALSSLMVAQAIPLVGELVDIGFAAYNFVESIINLFQVVHNSYNRPAYSPGHKT

SEQ ID NO: 36 - protein, 387 aa, Artificial Sequence
  Description of Artificial Sequence: Synthetic polypeptide
MGADDVVDFSKSFVMENFSSYHGTKPGYVDSIQKGIQKPKSGTQGNYDDDWKGFYSTDNKYDAAGYSVDNENPLSGKAGGVVKVTYPGLTKVLALKVDNAETIKKELGLSLTEPLMEQVGTEEFIKRFGDGASRVVLSLPFAEGSSSVEYINNWEQAKALSVELEINFETRGKRGQDAMYEYMAQACAGNRVRRSVGSSLSCINLDWDVIRDKTKTKIESLKEHGPIKNKMSESPNKTVSEEKAKQYLEEFHQTALEHPELSELKTVTGTNPVFAGANYAAWAVNVAQVIDSETADNLEKTTAALSILPGIGSVMGIADGAVHHNTEEIVAQSIALSSLMVAQAIPLVGELVDIGFAAYNFVESIINLFQVVHNSYNRPAYSPGHKT

SEQ ID NO: 37 - protein, 387 aa, Artificial Sequence
  Description of Artificial Sequence: Synthetic polypeptide
MGADDVVDCSKSFVMENFSSYHGTKPGYVDSIQKGIQKPKSGTQGNYDDDWKGFYSTDNKYDAAGYSVDNENPLSGKAGGVVKVTYPGLTKVLALKVDNAETIKKELGLSLTEPLMEQVGTEEFIKRFGDGASRVVLSLPFAEGSSSVEYINNWEQAKALSVELEINFETRGKRGQDAMYEYMAQACAGNRVRRSVGSSLSCINLDWDVIRDKTKTKIESLKEHGPIKNKMSESPNKTVSEEKAKQYLEEFHQTALEHPELSELKTVTGTNPVFAGANYAAWAVNVAQVIDSETADNLEKTTAALSILPGIGSVMGIADGAVHHNTEEIVAQSIALSSLMVAQAIPLVGELVDIGFAAYNFVESIINLFQVVHNSYNRPAYSPGHKT

SEQ ID NO: 38 - protein, 387 aa, Artificial Sequence
  Description of Artificial Sequence: Synthetic polypeptide
MGADDVVDMSKSFVMENFSSYHGTKPGYVDSIQKGIQKPKSGTQGNYDDDWKGFYSTDNKYDAAGYSVDNENPLSGKAGGVVKVTYPGLTKVLALKVDNAETIKKELGLSLTEPLMEQVGTEEFIKRFGDGASRVVLSLPFAEGSSSVEYINNWEQAKALSVELEINFETRGKRGQDAMYEYMAQACAGNRVRRSVGSSLSCINLDWDVIRDKTKTKIESLKEHGPIKNKMSESPNKTVSEEKAKQYLEEFHQTALEHPELSELKTVTGTNPVFAGANYAAWAVNVAQVIDSETADNLEKTTAALSILPGIGSVMGIADGAVHHNTEEIVAQSIALSSLMVAQAIPLVGELVDIGFAAYNFVESIINLFQVVHNSYNRPAYSPGHKT

SEQ ID NO: 39 - protein, 387 aa, Artificial Sequence
  Description of Artificial Sequence: Synthetic polypeptide
MGADDVVDASKSFVMENFSSYHGTKPGYVDSIQKGIQKPKSGTQGNYDDDWKGFYSTDNKYDAAGYSVDNENPLSGKAGGVVKVTYPGLTKVLALKVDNAETIKKELGLSLTEPLMEQVGTEEFIKRFGDGASRVVLSLPFAEGSSSVEYINNWEQAKALSVELEINFETRGKRGQDAMYEYMAQACAGNRVRRSVGSSLSCINLDWDVIRDKTKTKIESLKEHGPIKNKMSESPNKTVSEEKAKQYLEEFHQTALEHPELSELKTVTGTNPVFAGANYAAWAVNVAQVIDSETADNLEKTTAALSILPGIGSVMGIADGAVHHNTEEIVAQSIALSSLMVAQAIPLVGELVDIGFAAYNFVESIINLFQVVHNSYNRPAYSPGHKT

SEQ ID NO: 40 - protein, 387 aa, Artificial Sequence
  Description of Artificial Sequence: Synthetic polypeptide
MGADDVVDGSKSFVMENFSSYHGTKPGYVDSIQKGIQKPKSGTQGNYDDDWKGFYSTDNKYDAAGYSVDNENPLSGKAGGVVKVTYPGLTKVLALKVDNAETIKKELGLSLTEPLMEQVGTEEFIKRFGDGASRVVLSLPFAEGSSSVEYINNWEQAKALSVELEINFETRGKRGQDAMYEYMAQACAGNRVRRSVGSSLSCINLDWDVIRDKTKTKIESLKEHGPIKNKMSESPNKTVSEEKAKQYLEEFHQTALEHPELSELKTVTGTNPVFAGANYAAWAVNVAQVIDSETADNLEKTTAALSILPGIGSVMGIADGAVHHNTEEIVAQSIALSSLMVAQAIPLVGELVDIGFAAYNFVESIINLFQVVHNSYNRPAYSPGHKT

SEQ ID NO: 41 - protein, 387 aa, Artificial Sequence
  Description of Artificial Sequence: Synthetic polypeptide
MGADDVVDTSKSFVMENFSSYHGTKPGYVDSIQKGIQKPKSGTQGNYDDDWKGFYSTDNKYDAAGYSVDNENPLSGKAGGVVKVTYPGLTKVLALKVDNAETIKKELGLSLTEPLMEQVGTEEFIKRFGDGASRVVLSLPFAEGSSSVEYINNWEQAKALSVELEINFETRGKRGQDAMYEYMAQACAGNRVRRSVGSSLSCINLDWDVIRDKTKTKIESLKEHGPIKNKMSESPNKTVSEEKAKQYLEEFHQTALEHPELSELKTVTGTNPVFAGANYAAWAVNVAQVIDSETADNLEKTTAALSILPGIGSVMGIADGAVHHNTEEIVAQSIALSSLMVAQAIPLVGELVDIGFAAYNFVESIINLFQVVHNSYNRPAYSPGHKT

SEQ ID NO: 42 - protein, 387 aa, Artificial Sequence
  Description of Artificial Sequence: Synthetic polypeptide
MGADDVVDWSKSFVMENFSSYHGTKPGYVDSIQKGIQKPKSGTQGNYDDDWKGFYSTDNKYDAAGYSVDNENPLSGKAGGVVKVTYPGLTKVLALKVDNAETIKKELGLSLTEPLMEQVGTEEFIKRFGDGASRVVLSLPFAEGSSSVEYINNWEQAKALSVELEINFETRGKRGQDAMYEYMAQACAGNRVRRSVGSSLSCINLDWDVIRDKTKTKIESLKEHGPIKNKMSESPNKTVSEEKAKQYLEEFHQTALEHPELSELKTVTGTNPVFAGANYAAWAVNVAQVIDSETADNLEKTTAALSILPGIGSVMGIADGAVHHNTEEIVAQSIALSSLMVAQAIPLVGELVDIGFAAYNFVESIINLFQVVHNSYNRPAYSPGHKT

SEQ ID NO: 43 - protein, 387 aa, Artificial Sequence
  Description of Artificial Sequence: Synthetic polypeptide
MGADDVVDYSKSFVMENFSSYHGTKPGYVDSIQKGIQKPKSGTQGNYDDDWKGFYSTDNKYDAAGYSVDNENPLSGKAGGVVKVTYPGLTKVLALKVDNAETIKKELGLSLTEPLMEQVGTEEFIKRFGDGASRVVLSLPFAEGSSSVEYINNWEQAKALSVELEINFETRGKRGQDAMYEYMAQACAGNRVRRSVGSSLSCINLDWDVIRDKTKTKIESLKEHGPIKNKMSESPNKTVSEEKAKQYLEEFHQTALEHPELSELKTVTGTNPVFAGANYAAWAVNVAQVIDSETADNLEKTTAALSILPGIGSVMGIADGAVHHNTEEIVAQSIALSSLMVAQAIPLVGELVDIGFAAYNFVESIINLFQVVHNSYNRPAYSPGHKT

SEQ ID NO: 44 - protein, 387 aa, Artificial Sequence
  Description of Artificial Sequence: Synthetic polypeptide
MGADDVVDPSKSFVMENFSSYHGTKPGYVDSIQKGIQKPKSGTQGNYDDDWKGFYSTDNKYDAAGYSVDNENPLSGKAGGVVKVTYPGLTKVLALKVDNAETIKKELGLSLTEPLMEQVGTEEFIKRFGDGASRVVLSLPFAEGSSSVEYINNWEQAKALSVELEINFETRGKRGQDAMYEYMAQACAGNRVRRSVGSSLSCINLDWDVIRDKTKTKIESLKEHGPIKNKMSESPNKTVSEEKAKQYLEEFHQTALEHPELSELKTVTGTNPVFAGANYAAWAVNVAQVIDSETADNLEKTTAALSILPGIGSVMGIADGAVHHNTEEIVAQSIALSSLMVAQAIPLVGELVDIGFAAYNFVESIINLFQVVHNSYNRPAYSPGHKT

SEQ ID NO: 45 - protein, 387 aa, Artificial Sequence
  Description of Artificial Sequence: Synthetic polypeptide
MGADDVVDHSKSFVMENFSSYHGTKPGYVDSIQKGIQKPKSGTQGNYDDDWKGFYSTDNKYDAAGYSVDNENPLSGKAGGVVKVTYPGLTKVLALKVDNAETIKKELGLSLTEPLMEQVGTEEFIKRFGDGASRVVLSLPFAEGSSSVEYINNWEQAKALSVELEINFETRGKRGQDAMYEYMAQACAGNRVRRSVGSSLSCINLDWDVIRDKTKTKIESLKEHGPIKNKMSESPNKTVSEEKAKQYLEEFHQTALEHPELSELKTVTGTNPVFAGANYAAWAVNVAQVIDSETADNLEKTTAALSILPGIGSVMGIADGAVHHNTEEIVAQSIALSSLMVAQAIPLVGELVDIGFAAYNFVESIINLFQVVHNSYNRPAYSPGHKT

SEQ ID NO: 46 - protein, 387 aa, Artificial Sequence
  Description of Artificial Sequence: Synthetic polypeptide
MGADDVVDESKSFVMENFSSYHGTKPGYVDSIQKGIQKPKSGTQGNYDDDWKGFYSTDNKYDAAGYSVDNENPLSGKAGGVVKVTYPGLTKVLALKVDNAETIKKELGLSLTEPLMEQVGTEEFIKRFGDGASRVVLSLPFAEGSSSVEYINNWEQAKALSVELEINFETRGKRGQDAMYEYMAQACAGNRVRRSVGSSLSCINLDWDVIRDKTKTKIESLKEHGPIKNKMSESPNKTVSEEKAKQYLEEFHQTALEHPELSELKTVTGTNPVFAGANYAAWAVNVAQVIDSETADNLEKTTAALSILPGIGSVMGIADGAVHHNTEEIVAQSIALSSLMVAQAIPLVGELVDIGFAAYNFVESIINLFQVVHNSYNRPAYSPGHKT

SEQ ID NO: 47 - protein, 387 aa, Artificial Sequence
  Description of Artificial Sequence: Synthetic polypeptide
MGADDVVDQSKSFVMENFSSYHGTKPGYVDSIQKGIQKPKSGTQGNYDDDWKGFYSTDNKYDAAGYSVDNENPLSGKAGGVVKVTYPGLTKVLALKVDNAETIKKELGLSLTEPLMEQVGTEEFIKRFGDGASRVVLSLPFAEGSSSVEYINNWEQAKALSVELEINFETRGKRGQDAMYEYMAQACAGNRVRRSVGSSLSCINLDWDVIRDKTKTKIESLKEHGPIKNKMSESPNKTVSEEKAKQYLEEFHQTALEHPELSELKTVTGTNPVFAGANYAAWAVNVAQVIDSETADNLEKTTAALSILPGIGSVMGIADGAVHHNTEEIVAQSIALSSLMVAQAIPLVGELVDIGFAAYNFVESIINLFQVVHNSYNRPAYSPGHKT

SEQ ID NO: 48 - protein, 387 aa, Artificial Sequence
  Description of Artificial Sequence: Synthetic polypeptide
MGADDVVDDSKSFVMENFSSYHGTKPGYVDSIQKGIQKPKSGTQGNYDDDWKGFYSTDNKYDAAGYSVDNENPLSGKAGGVVKVTYPGLTKVLALKVDNAETIKKELGLSLTEPLMEQVGTEEFIKRFGDGASRVVLSLPFAEGSSSVEYINNWEQAKALSVELEINFETRGKRGQDAMYEYMAQACAGNRVRRSVGSSLSCINLDWDVIRDKTKTKIESLKEHGPIKNKMSESPNKTVSEEKAKQYLEEFHQTALEHPELSELKTVTGTNPVFAGANYAAWAVNVAQVIDSETADNLEKTTAALSILPGIGSVMGIADGAVHHNTEEIVAQSIALSSLMVAQAIPLVGELVDIGFAAYNFVESIINLFQVVHNSYNRPAYSPGHKT

SEQ ID NO: 49 - protein, 387 aa, Artificial Sequence
  Description of Artificial Sequence: Synthetic polypeptide
MGADDVVDNSKSFVMENFSSYHGTKPGYVDSIQKGIQKPKSGTQGNYDDDWKGFYSTDNKYDAAGYSVDNENPLSGKAGGVVKVTYPGLTKVLALKVDNAETIKKELGLSLTEPLMEQVGTEEFIKRFGDGASRVVLSLPFAEGSSSVEYINNWEQAKALSVELEINFETRGKRGQDAMYEYMAQACAGNRVRRSVGSSLSCINLDWDVIRDKTKTKIESLKEHGPIKNKMSESPNKTVSEEKAKQYLEEFHQTALEHPELSELKTVTGTNPVFAGANYAAWAVNVAQVIDSETADNLEKTTAALSILPGIGSVMGIADGAVHHNTEEIVAQSIALSSLMVAQAIPLVGELVDIGFAAYNFVESIINLFQVVHNSYNRPAYSPGHKT

SEQ ID NO: 50 - protein, 387 aa, Artificial Sequence
  Description of Artificial Sequence: Synthetic polypeptide
MGADDVVDKSKSFVMENFSSYHGTKPGYVDSIQKGIQKPKSGTQGNYDDDWKGFYSTDNKYDAAGYSVDNENPLSGKAGGVVKVTYPGLTKVLALKVDNAETIKKELGLSLTEPLMEQVGTEEFIKRFGDGASRVVLSLPFAEGSSSVEYINNWEQAKALSVELEINFETRGKRGQDAMYEYMAQACAGNRVRRSVGSSLSCINLDWDVIRDKTKTKIESLKEHGPIKNKMSESPNKTVSEEKAKQYLEEFHQTALEHPELSELKTVTGTNPVFAGANYAAWAVNVAQVIDSETADNLEKTTAALSILPGIGSVMGIADGAVHHNTEEIVAQSIALSSLMVAQAIPLVGELVDIGFAAYNFVESIINLFQVVHNSYNRPAYSPGHKT

SEQ ID NO: 51 - protein, 387 aa, Artificial Sequence
  Description of Artificial Sequence: Synthetic polypeptide
MGADDVVDRSKSFVMENFSSYHGTKPGYVDSIQKGIQKPKSGTQGNYDDDWKGFYSTDNKYDAAGYSVDNENPLSGKAGGVVKVTYPGLTKVLALKVDNAETIKKELGLSLTEPLMEQVGTEEFIKRFGDGASRVVLSLPFAEGSSSVEYINNWEQAKALSVELEINFETRGKRGQDAMYEYMAQACAGNRVRRSVGSSLSCINLDWDVIRDKTKTKIESLKEHGPIKNKMSESPNKTVSEEKAKQYLEEFHQTALEHPELSELKTVTGTNPVFAGANYAAWAVNVAQVIDSETADNLEKTTAALSILPGIGSVMGIADGAVHHNTEEIVAQSIALSSLMVAQAIPLVGELVDIGFAAYNFVESIINLFQVVHNSYNRPAYSPGHKT

SEQ ID NO: 52 - protein, 387 aa, Artificial Sequence
  Description of Artificial Sequence: Synthetic polypeptide
MGADDVVDSSKSFVMENFSSYHGTKPGYFDSIQKGIQKPKSGTQGNYDDDWKGFYSTDNKYDAAGYSVDNENPLSGKAGGVVKVTYPGLTKVLALKVDNAETIKKELGLSLTEPLMEQVGTEEFIKRFGDGASRVVLSLPFAEGSSSVEYINNWEQAKALSVELEINFETRGKRGQDAMYEYMAQACAGNRVRRSVGSSLSCINLDWDVIRDKTKTKIESLKEHGPIKNKMSESPNKTVSEEKAKQYLEEFHQTALEHPELSELKTVTGTNPVFAGANYAAWAVNVAQVIDSETADNLEKTTAALSILPGIGSVMGIADGAVHHNTEEIVAQSIALSSLMVAQAIPLVGELVDIGFAAYNFVESIINLFQVVHNSYNRPAYSPGHKT

SEQ ID NO: 53 - protein, 387 aa, Artificial Sequence
  Description of Artificial Sequence: Synthetic polypeptide
MGADDVVDSSKSFVMENFSSYHGTKPGYCDSIQKGIQKPKSGTQGNYDDDWKGFYSTDNKYDAAGYSVDNENPLSGKAGGVVKVTYPGLTKVLALKVDNAETIKKELGLSLTEPLMEQVGTEEFIKRFGDGASRVVLSLPFAEGSSSVEYINNWEQAKALSVELEINFETRGKRGQDAMYEYMAQACAGNRVRRSVGSSLSCINLDWDVIRDKTKTKIESLKEHGPIKNKMSESPNKTVSEEKAKQYLEEFHQTALEHPELSELKTVTGTNPVFAGANYAAWAVNVAQVIDSETADNLEKTTAALSILPGIGSVMGIADGAVHHNTEEIVAQSIALSSLMVAQAIPLVGELVDIGFAAYNFVESIINLFQVVHNSYNRPAYSPGHKT

SEQ ID NO: 54 - protein, 387 aa, Artificial Sequence
  Description of Artificial Sequence: Synthetic polypeptide
MGADDVVDSSKSFVMENFSSYHGTKPGYMDSIQKGIQKPKSGTQGNYDDDWKGFYSTDNKYDAAGYSVDNENPLSGKAGGVVKVTYPGLTKVLALKVDNAETIKKELGLSLTEPLMEQVGTEEFIKRFGDGASRVVLSLPFAEGSSSVEYINNWEQAKALSVELEINFETRGKRGQDAMYEYMAQACAGNRVRRSVGSSLSCINLDWDVIRDKTKTKIESLKEHGPIKNKMSESPNKTVSEEKAKQYLEEFHQTALEHPELSELKTVTGTNPVFAGANYAAWAVNVAQVIDSETADNLEKTTAALSILPGIGSVMGIADGAVHHNTEEIVAQSIALSSLMVAQAIPLVGELVDIGFAAYNFVESIINLFQVVHNSYNRPAYSPGHKT

SEQ ID NO: 55 - protein, 387 aa, Artificial Sequence
  Description of Artificial Sequence: Synthetic polypeptide
MGADDVVDSSKSFVMENFSSYHGTKPGYTDSIQKGIQKPKSGTQGNYDDDWKGFYSTDNKYDAAGYSVDNENPLSGKAGGVVKVTYPGLTKVLALKVDNAETIKKELGLSLTEPLMEQVGTEEFIKRFGDGASRVVLSLPFAEGSSSVEYINNWEQAKALSVELEINFETRGKRGQDAMYEYMAQACAGNRVRRSVGSSLSCINLDWDVIRDKTKTKIESLKEHGPIKNKMSESPNKTVSEEKAKQYLEEFHQTALEHPELSELKTVTGTNPVFAGANYAAWAVNVAQVIDSETADNLEKTTAALSILPGIGSVMGIADGAVHHNTEEIVAQSIALSSLMVAQAIPLVGELVDIGFAAYNFVESIINLFQVVHNSYNRPAYSPGHKT

SEQ ID NO: 56 - protein, 387 aa, Artificial Sequence
  Description of Artificial Sequence: Synthetic polypeptide
MGADDVVDSSKSFVMENFSSYHGTKPGYWDSIQKGIQKPKSGTQGNYDDDWKGFYSTDNKYDAAGYSVDNENPLSGKAGGVVKVTYPGLTKVLALKVDNAETIKKELGLSLTEPLMEQVGTEEFIKRFGDGASRVVLSLPFAEGSSSVEYINNWEQAKALSVELEINFETRGKRGQDAMYEYMAQACAGNRVRRSVGSSLSCINLDWDVIRDKTKTKIESLKEHGPIKNKMSESPNKTVSEEKAKQYLEEFHQTALEHPELSELKTVTGTNPVFAGANYAAWAVNVAQVIDSETADNLEKTTAALSILPGIGSVMGIADGAVHHNTEEIVAQSIALSSLMVAQAIPLVGELVDIGFAAYNFVESIINLFQVVHNSYNRPAYSPGHKT

SEQ ID NO: 57 - protein, 387 aa, Artificial Sequence
  Description of Artificial Sequence: Synthetic polypeptide
MGADDVVDSSKSFVMENFSSYHGTKPGYYDSIQKGIQKPKSGTQGNYDDDWKGFYSTDNKYDAAGYSVDNENPLSGKAGGVVKVTYPGLTKVLALKVDNAETIKKELGLSLTEPLMEQVGTEEFIKRFGDGASRVVLSLPFAEGSSSVEYINNWEQAKALSVELEINFETRGKRGQDAMYEYMAQACAGNRVRRSVGSSLSCINLDWDVIRDKTKTKIESLKEHGPIKNKMSESPNKTVSEEKAKQYLEEFHQTALEHPELSELKTVTGTNPVFAGANYAAWAVNVAQVIDSETADNLEKTTAALSILPGIGSVMGIADGAVHHNTEEIVAQSIALSSLMVAQAIPLVGELVDIGFAAYNFVESIINLFQVVHNSYNRPAYSPGHKT

SEQ ID NO: 58 - protein, 387 aa, Artificial Sequence
  Description of Artificial Sequence: Synthetic polypeptide
MGADDVVDSSKSFVMENFSSYHGTKPGYPDSIQKGIQKPKSGTQGNYDDDWKGFYSTDNKYDAAGYSVDNENPLSGKAGGVVKVTYPGLTKVLALKVDNAETIKKELGLSLTEPLMEQVGTEEFIKRFGDGASRVVLSLPFAEGSSSVEYINNWEQAKALSVELEINFETRGKRGQDAMYEYMAQACAGNRVRRSVGSSLSCINLDWDVIRDKTKTKIESLKEHGPIKNKMSESPNKTVSEEKAKQYLEEFHQTALEHPELSELKTVTGTNPVFAGANYAAWAVNVAQVIDSETADNLEKTTAALSILPGIGSVMGIADGAVHHNTEEIVAQSIALSSLMVAQAIPLVGELVDIGFAAYNFVESIINLFQVVHNSYNRPAYSPGHKT

SEQ ID NO: 59 - protein, 387 aa, Artificial Sequence
  Description of Artificial Sequence: Synthetic polypeptide
MGADDVVDSSKSFVMENFSSYHGTKPGYHDSIQKGIQKPKSGTQGNYDDDWKGFYSTDNKYDAAGYSVDNENPLSGKAGGVVKVTYPGLTKVLALKVDNAETIKKELGLSLTEPLMEQVGTEEFIKRFGDGASRVVLSLPFAEGSSSVEYINNWEQAKALSVELEINFETRGKRGQDAMYEYMAQACAGNRVRRSVGSSLSCINLDWDVIRDKTKTKIESLKEHGPIKNKMSESPNKTVSEEKAKQYLEEFHQTALEHPELSELKTVTGTNPVFAGANYAAWAVNVAQVIDSETADNLEKTTAALSILPGIGSVMGIADGAVHHNTEEIVAQSIALSSLMVAQAIPLVGELVDIGFAAYNFVESIINLFQVVHNSYNRPAYSPGHKT

SEQ ID NO: 60 - protein, 387 aa, Artificial Sequence
  Description of Artificial Sequence: Synthetic polypeptide
MGADDVVDSSKSFVMENFSSYHGTKPGYEDSIQKGIQKPKSGTQGNYDDDWKGFYSTDNKYDAAGYSVDNENPLSGKAGGVVKVTYPGLTKVLALKVDNAETIKKELGLSLTEPLMEQVGTEEFIKRFGDGASRVVLSLPFAEGSSSVEYINNWEQAKALSVELEINFETRGKRGQDAMYEYMAQACAGNRVRRSVGSSLSCINLDWDVIRDKTKTKIESLKEHGPIKNKMSESPNKTVSEEKAKQYLEEFHQTALEHPELSELKTVTGTNPVFAGANYAAWAVNVAQVIDSETADNLEKTTAALSILPGIGSVMGIADGAVHHNTEEIVAQSIALSSLMVAQAIPLVGELVDIGFAAYNFVESIINLFQVVHNSYNRPAYSPGHKT

SEQ ID NO: 61 - protein, 387 aa, Artificial Sequence
  Description of Artificial Sequence: Synthetic polypeptide
MGADDVVDSSKSFVMENFSSYHGTKPGYQDSIQKGIQKPKSGTQGNYDDDWKGFYSTDNKYDAAGYSVDNENPLSGKAGGVVKVTYPGLTKVLALKVDNAETIKKELGLSLTEPLMEQVGTEEFIKRFGDGASRVVLSLPFAEGSSSVEYINNWEQAKALSVELEINFETRGKRGQDAMYEYMAQACAGNRVRRSVGSSLSCINLDWDVIRDKTKTKIESLKEHGPIKNKMSESPNKTVSEEKAKQYLEEFHQTALEHPELSELKTVTGTNPVFAGANYAAWAVNVAQVIDSETADNLEKTTAALSILPGIGSVMGIADGAVHHNTEEIVAQSIALSSLMVAQAIPLVGELVDIGFAAYNFVESIINLFQVVHNSYNRPAYSPGHKT

SEQ ID NO: 62 - protein, 387 aa, Artificial Sequence
  Description of Artificial Sequence: Synthetic polypeptide
MGADDVVDSSKSFVMENFSSYHGTKPGYDDSIQKGIQKPKSGTQGNYDDDWKGFYSTDNKYDAAGYSVDNENPLSGKAGGVVKVTYPGLTKVLALKVDNAETIKKELGLSLTEPLMEQVGTEEFIKRFGDGASRVVLSLPFAEGSSSVEYINNWEQAKALSVELEINFETRGKRGQDAMYEYMAQACAGNRVRRSVGSSLSCINLDWDVIRDKTKTKIESLKEHGPIKNKMSESPNKTVSEEKAKQYLEEFHQTALEHPELSELKTVTGTNPVFAGANYAAWAVNVAQVIDSETADNLEKTTAALSILPGIGSVMGIADGAVHHNTEEIVAQSIALSSLMVAQAIPLVGELVDIGFAAYNFVESIINLFQVVHNSYNRPAYSPGHKT

SEQ ID NO: 63 - protein, 387 aa, Artificial Sequence
  Description of Artificial Sequence: Synthetic polypeptide
MGADDVVDSSKSFVMENFSSYHGTKPGYNDSIQKGIQKPKSGTQGNYDDDWKGFYSTDNKYDAAGYSVDNENPLSGKAGGVVKVTYPGLTKVLALKVDNAETIKKELGLSLTEPLMEQVGTEEFIKRFGDGASRVVLSLPFAEGSSSVEYINNWEQAKALSVELEINFETRGKRGQDAMYEYMAQACAGNRVRRSVGSSLSCINLDWDVIRDKTKTKIESLKEHGPIKNKMSESPNKTVSEEKAKQYLEEFHQTALEHPELSELKTVTGTNPVFAGANYAAWAVNVAQVIDSETADNLEKTTAALSILPGIGSVMGIADGAVHHNTEEIVAQSIALSSLMVAQAIPLVGELVDIGFAAYNFVESIINLFQVVHNSYNRPAYSPGHKT

SEQ ID NO: 64 - protein, 387 aa, Artificial Sequence
  Description of Artificial Sequence: Synthetic polypeptide
MGADDVVDSSKSFVMENFSSYHGTKPGYKDSIQKGIQKPKSGTQGNYDDDWKGFYSTDNKYDAAGYSVDNENPLSGKAGGVVKVTYPGLTKVLALKVDNAETIKKELGLSLTEPLMEQVGTEEFIKRFGDGASRVVLSLPFAEGSSSVEYINNWEQAKALSVELEINFETRGKRGQDAMYEYMAQACAGNRVRRSVGSSLSCINLDWDVIRDKTKTKIESLKEHGPIKNKMSESPNKTVSEEKAKQYLEEFHQTALEHPELSELKTVTGTNPVFAGANYAAWAVNVAQVIDSETADNLEKTTAALSILPGIGSVMGIADGAVHHNTEEIVAQSIALSSLMVAQAIPLVGELVDIGFAAYNFVESIINLFQVVHNSYNRPAYSPGHKT

SEQ ID NO: 65 - protein, 387 aa, Artificial Sequence
  Description of Artificial Sequence: Synthetic polypeptide
MGADDVVDSSKSFVMENFSSYHGTKPGYRDSIQKGIQKPKSGTQGNYDDDWKGFYSTDNKYDAAGYSVDNENPLSGKAGGVVKVTYPGLTKVLALKVDNAETIKKELGLSLTEPLMEQVGTEEFIKRFGDGASRVVLSLPFAEGSSSVEYINNWEQAKALSVELEINFETRGKRGQDAMYEYMAQACAGNRVRRSVGSSLSCINLDWDVIRDKTKTKIESLKEHGPIKNKMSESPNKTVSEEKAKQYLEEFHQTALEHPELSELKTVTGTNPVFAGANYAAWAVNVAQVIDSETADNLEKTTAALSILPGIGSVMGIADGAVHHNTEEIVAQSIALSSLMVAQAIPLVGELVDIGFAAYNFVESIINLFQVVHNSYNRPAYSPGHKT

SEQ ID NO: 66 - protein, 387 aa, Artificial Sequence
  Description of Artificial Sequence: Synthetic polypeptide
MGADDVVDSSKSFVMENFSSYHGTKPGYVISIQKGIQKPKSGTQGNYDDDWKGFYSTDNKYDAAGYSVDNENPLSGKAGGVVKVTYPGLTKVLALKVDNAETIKKELGLSLTEPLMEQVGTEEFIKRFGDGASRVVLSLPFAEGSSSVEYINNWEQAKALSVELEINFETRGKRGQDAMYEYMAQACAGNRVRRSVGSSLSCINLDWDVIRDKTKTKIESLKEHGPIKNKMSESPNKTVSEEKAKQYLEEFHQTALEHPELSELKTVTGTNPVFAGANYAAWAVNVAQVIDSETADNLEKTTAALSILPGIGSVMGIADGAVHHNTEEIVAQSIALSSLMVAQAIPLVGELVDIGFAAYNFVESIINLFQVVHNSYNRPAYSPGHKT

SEQ ID NO: 67 - protein, 387 aa, Artificial Sequence
  Description of Artificial Sequence: Synthetic polypeptide
MGADDVVDSSKSFVMENFSSYHGTKPGYVVSIQKGIQKPKSGTQGNYDDDWKGFYSTDNKYDAAGYSVDNENPLSGKAGGVVKVTYPGLTKVLALKVDNAETIKKELGLSLTEPLMEQVGTEEFIKRFGDGASRVVLSLPFAEGSSSVEYINNWEQAKALSVELEINFETRGKRGQDAMYEYMAQACAGNRVRRSVGSSLSCINLDWDVIRDKTKTKIESLKEHGPIKNKMSESPNKTVSEEKAKQYLEEFHQTALEHPELSELKTVTGTNPVFAGANYAAWAVNVAQVIDSETADNLEKTTAALSILPGIGSVMGIADGAVHHNTEEIVAQSIALSSLMVAQAIPLVGELVDIGFAAYNFVESIINLFQVVHNSYNRPAYSPGHKT

SEQ ID NO: 68 - protein, 387 aa, Artificial Sequence
  Description of Artificial Sequence: Synthetic polypeptide
MGADDVVDSSKSFVMENFSSYHGTKPGYVLSIQKGIQKPKSGTQGNYDDDWKGFYSTDNKYDAAGYSVDNENPLSGKAGGVVKVTYPGLTKVLALKVDNAETIKKELGLSLTEPLMEQVGTEEFIKRFGDGASRVVLSLPFAEGSSSVEYINNWEQAKALSVELEINFETRGKRGQDAMYEYMAQACAGNRVRRSVGSSLSCINLDWDVIRDKTKTKIESLKEHGPIKNKMSESPNKTVSEEKAKQYLEEFHQTALEHPELSELKTVTGTNPVFAGANYAAWAVNVAQVIDSETADNLEKTTAALSILPGIGSVMGIADGAVHHNTEEIVAQSIALSSLMVAQAIPLVGELVDIGFAAYNFVESIINLFQVVHNSYNRPAYSPGHKT

SEQ ID NO: 69 - protein, 387 aa, Artificial Sequence
  Description of Artificial Sequence: Synthetic polypeptide
MGADDVVDSSKSFVMENFSSYHGTKPGYVFSIQKGIQKPKSGTQGNYDDDWKGFYSTDNKYDAAGYSVDNENPLSGKAGGVVKVTYPGLTKVLALKVDNAETIKKELGLSLTEPLMEQVGTEEFIKRFGDGASRVVLSLPFAEGSSSVEYINNWEQAKALSVELEINFETRGKRGQDAMYEYMAQACAGNRVRRSVGSSLSCINLDWDVIRDKTKTKIESLKEHGPIKNKMSESPNKTVSEEKAKQYLEEFHQTALEHPELSELKTVTGTNPVFAGANYAAWAVNVAQVIDSETADNLEKTTAALSILPGIGSVMGIADGAVHHNTEEIVAQSIALSSLMVAQAIPLVGELVDIGFAAYNFVESIINLFQVVHNSYNRPAYSPGHKT

SEQ ID NO: 70 - protein, 387 aa, Artificial Sequence
  Description of Artificial Sequence: Synthetic polypeptide
MGADDVVDSSKSFVMENFSSYHGTKPGYVCSIQKGIQKPKSGTQGNYDDDWKGFYSTDNKYDAAGYSVDNENPLSGKAGGVVKVTYPGLTKVLALKVDNAETIKKELGLSLTEPLMEQVGTEEFIKRFGDGASRVVLSLPFAEGSSSVEYINNWEQAKALSVELEINFETRGKRGQDAMYEYMAQACAGNRVRRSVGSSLSCINLDWDVIRDKTKTKIESLKEHGPIKNKMSESPNKTVSEEKAKQYLEEFHQTALEHPELSELKTVTGTNPVFAGANYAAWAVNVAQVIDSETADNLEKTTAALSILPGIGSVMGIADGAVHHNTEEIVAQSIALSSLMVAQAIPLVGELVDIGFAAYNFVESIINLFQVVHNSYNRPAYSPGHKT

SEQ ID NO: 71 - protein, 387 aa, Artificial Sequence
  Description of Artificial Sequence: Synthetic polypeptide
MGADDVVDSSKSFVMENFSSYHGTKPGYVMSIQKGIQKPKSGTQGNYDDDWKGFYSTDNKYDAAGYSVDNENPLSGKAGGVVKVTYPGLTKVLALKVDNAETIKKELGLSLTEPLMEQVGTEEFIKRFGDGASRVVLSLPFAEGSSSVEYINNWEQAKALSVELEINFETRGKRGQDAMYEYMAQACAGNRVRRSVGSSLSCINLDWDVIRDKTKTKIESLKEHGPIKNKMSESPNKTVSEEKAKQYLEEFHQTALEHPELSELKTVTGTNPVFAGANYAAWAVNVAQVIDSETADNLEKTTAALSILPGIGSVMGIADGAVHHNTEEIVAQSIALSSLMVAQAIPLVGELVDIGFAAYNFVESIINLFQVVHNSYNRPAYSPGHKT

SEQ ID NO: 72 - protein, 387 aa, Artificial Sequence
  Description of Artificial Sequence: Synthetic polypeptide
MGADDVVDSSKSFVMENFSSYHGTKPGYVASIQKGIQKPKSGTQGNYDDDWKGFYSTDNKYDAAGYSVDNENPLSGKAGGVVKVTYPGLTKVLALKVDNAETIKKELGLSLTEPLMEQVGTEEFIKRFGDGASRVVLSLPFAEGSSSVEYINNWEQAKALSVELEINFETRGKRGQDAMYEYMAQACAGNRVRRSVGSSLSCINLDWDVIRDKTKTKIESLKEHGPIKNKMSESPNKTVSEEKAKQYLEEFHQTALEHPELSELKTVTGTNPVFAGANYAAWAVNVAQVIDSETADNLEKTTAALSILPGIGSVMGIADGAVHHNTEEIVAQSIALSSLMVAQAIPLVGELVDIGFAAYNFVESIINLFQVVHNSYNRPAYSPGHKT

SEQ ID NO: 73 - protein, 387 aa, Artificial Sequence
  Description of Artificial Sequence: Synthetic polypeptide
MGADDVVDSSKSFVMENFSSYHGTKPGYVGSIQKGIQKPKSGTQGNYDDDWKGFYSTDNKYDAAGYSVDNENPLSGKAGGVVKVTYPGLTKVLALKVDNAETIKKELGLSLTEPLMEQVGTEEFIKRFGDGASRVVLSLPFAEGSSSVEYINNWEQAKALSVELEINFETRGKRGQDAMYEYMAQACAGNRVRRSVGSSLSCINLDWDVIRDKTKTKIESLKEHGPIKNKMSESPNKTVSEEKAKQYLEEFHQTALEHPELSELKTVTGTNPVFAGANYAAWAVNVAQVIDSETADNLEKTTAALSILPGIGSVMGIADGAVHHNTEEIVAQSIALSSLMVAQAIPLVGELVDIGFAAYNFVESIINLFQVVHNSYNRPAYSPGHKT

SEQ ID NO: 74 - protein, 387 aa, Artificial Sequence
  Description of Artificial Sequence: Synthetic polypeptide
MGADDVVDSSKSFVMENFSSYHGTKPGYVTSIQKGIQKPKSGTQGNYDDDWKGFYSTDNKYDAAGYSVDNENPLSGKAGGVVKVTYPGLTKVLALKVDNAETIKKELGLSLTEPLMEQVGTEEFIKRFGDGASRVVLSLPFAEGSSSVEYINNWEQAKALSVELEINFETRGKRGQDAMYEYMAQACAGNRVRRSVGSSLSCINLDWDVIRDKTKTKIESLKEHGPIKNKMSESPNKTVSEEKAKQYLEEFHQTALEHPELSELKTVTGTNPVFAGANYAAWAVNVAQVIDSETADNLEKTTAALSILPGIGSVMGIADGAVHHNTEEIVAQSIALSSLMVAQAIPLVGELVDIGFAAYNFVESIINLFQVVHNSYNRPAYSPGHKT

SEQ ID NO: 75 - protein, 387 aa, Artificial Sequence
  Description of Artificial Sequence: Synthetic polypeptide
MGADDVVDSSKSFVMENFSSYHGTKPGYVWSIQKGIQKPKSGTQGNYDDDWKGFYSTDNKYDAAGYSVDNENPLSGKAGGVVKVTYPGLTKVLALKVDNAETIKKELGLSLTEPLMEQVGTEEFIKRFGDGASRVVLSLPFAEGSSSVEYINNWEQAKALSVELEINFETRGKRGQDAMYEYMAQACAGNRVRRSVGSSLSCINLDWDVIRDKTKTKIESLKEHGPIKNKMSESPNKTVSEEKAKQYLEEFHQTALEHPELSELKTVTGTNPVFAGANYAAWAVNVAQVIDSETADNLEKTTAALSILPGIGSVMGIADGAVHHNTEEIVAQSIALSSLMVAQAIPLVGELVDIGFAAYNFVESIINLFQVVHNSYNRPAYSPGHKT

SEQ ID NO: 76 - protein, 387 aa, Artificial Sequence
  Description of Artificial Sequence: Synthetic polypeptide
MGADDVVDSSKSFVMENFSSYHGTKPGYVYSIQKGIQKPKSGTQGNYDDDWKGFYSTDNKYDAAGYSVDNENPLSGKAGGVVKVTYPGLTKVLALKVDNAETIKKELGLSLTEPLMEQVGTEEFIKRFGDGASRVVLSLPFAEGSSSVEYINNWEQAKALSVELEINFETRGKRGQDAMYEYMAQACAGNRVRRSVGSSLSCINLDWDVIRDKTKTKIESLKEHGPIKNKMSESPNKTVSEEKAKQYLEEFHQTALEHPELSELKTVTGTNPVFAGANYAAWAVNVAQVIDSETADNLEKTTAALSILPGIGSVMGIADGAVHHNTEEIVAQSIALSSLMVAQAIPLVGELVDIGFAAYNFVESIINLFQVVHNSYNRPAYSPGHKT

SEQ ID NO: 77 - protein, 387 aa, Artificial Sequence
  Description of Artificial Sequence: Synthetic polypeptide
MGADDVVDSSKSFVMENFSSYHGTKPGYVPSIQKGIQKPKSGTQGNYDDDWKGFYSTDNKYDAAGYSVDNENPLSGKAGGVVKVTYPGLTKVLALKVDNAETIKKELGLSLTEPLMEQVGTEEFIKRFGDGASRVVLSLPFAEGSSSVEYINNWEQAKALSVELEINFETRGKRGQDAMYEYMAQACAGNRVRRSVGSSLSCINLDWDVIRDKTKTKIESLKEHGPIKNKMSESPNKTVSEEKAKQYLEEFHQTALEHPELSELKTVTGTNPVFAGANYAAWAVNVAQVIDSETADNLEKTTAALSILPGIGSVMGIADGAVHHNTEEIVAQSIALSSLMVAQAIPLVGELVDIGFAAYNFVESIINLFQVVHNSYNRPAYSPGHKT

SEQ ID NO: 78 - protein, 387 aa, Artificial Sequence
  Description of Artificial Sequence: Synthetic polypeptide
MGADDVVDSSKSFVMENFSSYHGTKPGYVHSIQKGIQKPKSGTQGNYDDDWKGFYSTDNKYDAAGYSVDNENPLSGKAGGVVKVTYPGLTKVLALKVDNAETIKKELGLSLTEPLMEQVGTEEFIKRFGDGASRVVLSLPFAEGSSSVEYINNWEQAKALSVELEINFETRGKRGQDAMYEYMAQACAGNRVRRSVGSSLSCINLDWDVIRDKTKTKIESLKEHGPIKNKMSESPNKTVSEEKAKQYLEEFHQTALEHPELSELKTVTGTNPVFAGANYAAWAVNVAQVIDSETADNLEKTTAALSILPGIGSVMGIADGAVHHNTEEIVAQSIALSSLMVAQAIPLVGELVDIGFAAYNFVESIINLFQVVHNSYNRPAYSPGHKT

SEQ ID NO: 79 - protein, 387 aa, Artificial Sequence
  Description of Artificial Sequence: Synthetic polypeptide
MGADDVVDSSKSFVMENFSSYHGTKPGYVQSIQKGIQKPKSGTQGNYDDDWKGFYSTDNKYDAAGYSVDNENPLSGKAGGVVKVTYPGLTKVLALKVDNAETIKKELGLSLTEPLMEQVGTEEFIKRFGDGASRVVLSLPFAEGSSSVEYINNWEQAKALSVELEINFETRGKRGQDAMYEYMAQACAGNRVRRSVGSSLSCINLDWDVIRDKTKTKIESLKEHGPIKNKMSESPNKTVSEEKAKQYLEEFHQTALEHPELSELKTVTGTNPVFAGANYAAWAVNVAQVIDSETADNLEKTTAALSILPGIGSVMGIADGAVHHNTEEIVAQSIALSSLMVAQAIPLVGELVDIGFAAYNFVESIINLFQVVHNSYNRPAYSPGHKT

SEQ ID NO: 80 - protein, 387 aa, Artificial Sequence
  Description of Artificial Sequence: Synthetic polypeptide
MGADDVVDSSKSFVMENFSSYHGTKPGYVNSIQKGIQKPKSGTQGNYDDDWKGFYSTDNKYDAAGYSVDNENPLSGKAGGVVKVTYPGLTKVLALKVDNAETIKKELGLSLTEPLMEQVGTEEFIKRFGDGASRVVLSLPFAEGSSSVEYINNWEQAKALSVELEINFETRGKRGQDAMYEYMAQACAGNRVRRSVGSSLSCINLDWDVIRDKTKTKIESLKEHGPIKNKMSESPNKTVSEEKAKQYLEEFHQTALEHPELSELKTVTGTNPVFAGANYAAWAVNVAQVIDSETADNLEKTTAALSILPGIGSVMGIADGAVHHNTEEIVAQSIALSSLMVAQAIPLVGELVDIGFAAYNFVESIINLFQVVHNSYNRPAYSPGHKT

SEQ ID NO: 81 - protein, 387 aa, Artificial Sequence
  Description of Artificial Sequence: Synthetic polypeptide
MGADDVVDSSKSFVMENFSSYHGTKPGYVKSIQKGIQKPKSGTQGNYDDDWKGFYSTDNKYDAAGYSVDNENPLSGKAGGVVKVTYPGLTKVLALKVDNAETIKKELGLSLTEPLMEQVGTEEFIKRFGDGASRVVLSLPFAEGSSSVEYINNWEQAKALSVELEINFETRGKRGQDAMYEYMAQACAGNRVRRSVGSSLSCINLDWDVIRDKTKTKIESLKEHGPIKNKMSESPNKTVSEEKAKQYLEEFHQTALEHPELSELKTVTGTNPVFAGANYAAWAVNVAQVIDSETADNLEKTTAALSILPGIGSVMGIADGAVHHNTEEIVAQSIALSSLMVAQAIPLVGELVDIGFAAYNFVESIINLFQVVHNSYNRPAYSPGHKT

SEQ ID NO: 82 - protein, 387 aa, Artificial Sequence
  Description of Artificial Sequence: Synthetic polypeptide
MGADDVVDSSKSFVMENFSSYHGTKPGYVRSIQKGIQKPKSGTQGNYDDDWKGFYSTDNKYDAAGYSVDNENPLSGKAGGVVKVTYPGLTKVLALKVDNAETIKKELGLSLTEPLMEQVGTEEFIKRFGDGASRVVLSLPFAEGSSSVEYINNWEQAKALSVELEINFETRGKRGQDAMYEYMAQACAGNRVRRSVGSSLSCINLDWDVIRDKTKTKIESLKEHGPIKNKMSESPNKTVSEEKAKQYLEEFHQTALEHPELSELKTVTGTNPVFAGANYAAWAVNVAQVIDSETADNLEKTTAALSILPGIGSVMGIADGAVHHNTEEIVAQSIALSSLMVAQAIPLVGELVDIGFAAYNFVESIINLFQVVHNSYNRPAYSPGHKT

SEQ ID NO: 83 - protein, 387 aa, Artificial Sequence
  Description of Artificial Sequence: Synthetic polypeptide
MGADDVVDSSKSFVMENFSSYHGTKPGYVDIIQKGIQKPKSGTQGNYDDDWKGFYSTDNKYDAAGYSVDNENPLSGKAGGVVKVTYPGLTKVLALKVDNAETIKKELGLSLTEPLMEQVGTEEFIKRFGDGASRVVLSLPFAEGSSSVEYINNWEQAKALSVELEINFETRGKRGQDAMYEYMAQACAGNRVRRSVGSSLSCINLDWDVIRDKTKTKIESLKEHGPIKNKMSESPNKTVSEEKAKQYLEEFHQTALEHPELSELKTVTGTNPVFAGANYAAWAVNVAQVIDSETADNLEKTTAALSILPGIGSVMGIADGAVHHNTEEIVAQSIALSSLMVAQAIPLVGELVDIGFAAYNFVESIINLFQVVHNSYNRPAYSPGHKT

SEQ ID NO: 84 - protein, 387 aa, Artificial Sequence
  Description of Artificial Sequence: Synthetic polypeptide
MGADDVVDSSKSFVMENFSSYHGTKPGYVDFIQKGIQKPKSGTQGNYDDDWKGFYSTDNKYDAAGYSVDNENPLSGKAGGVVKVTYPGLTKVLALKVDNAETIKKELGLSLTEPLMEQVGTEEFIKRFGDGASRVVLSLPFAEGSSSVEYINNWEQAKALSVELEINFETRGKRGQDAMYEYMAQACAGNRVRRSVGSSLSCINLDWDVIRDKTKTKIESLKEHGPIKNKMSESPNKTVSEEKAKQYLEEFHQTALEHPELSELKTVTGTNPVFAGANYAAWAVNVAQVIDSETADNLEKTTAALSILPGIGSVMGIADGAVHHNTEEIVAQSIALSSLMVAQAIPLVGELVDIGFAAYNFVESIINLFQVVHNSYNRPAYSPGHKT

SEQ ID NO: 85 - protein, 387 aa, Artificial Sequence
  Description of Artificial Sequence: Synthetic polypeptide
MGADDVVDSSKSFVMENFSSYHGTKPGYVDCIQKGIQKPKSGTQGNYDDDWKGFYSTDNKYDAAGYSVDNENPLSGKAGGVVKVTYPGLTKVLALKVDNAETIKKELGLSLTEPLMEQVGTEEFIKRFGDGASRVVLSLPFAEGSSSVEYINNWEQAKALSVELEINFETRGKRGQDAMYEYMAQACAGNRVRRSVGSSLSCINLDWDVIRDKTKTKIESLKEHGPIKNKMSESPNKTVSEEKAKQYLEEFHQTALEHPELSELKTVTGTNPVFAGANYAAWAVNVAQVIDSETADNLEKTTAALSILPGIGSVMGIADGAVHHNTEEIVAQSIALSSLMVAQAIPLVGELVDIGFAAYNFVESIINLFQVVHNSYNRPAYSPGHKT

SEQ ID NO: 86 - protein, 387 aa, Artificial Sequence
  Description of Artificial Sequence: Synthetic polypeptide
MGADDVVDSSKSFVMENFSSYHGTKPGYVDMIQKGIQKPKSGTQGNYDDDWKGFYSTDNKYDAAGYSVDNENPLSGKAGGVVKVTYPGLTKVLALKVDNAETIKKELGLSLTEPLMEQVGTEEFIKRFGDGASRVVLSLPFAEGSSSVEYINNWEQAKALSVELEINFETRGKRGQDAMYEYMAQACAGNRVRRSVGSSLSCINLDWDVIRDKTKTKIESLKEHGPIKNKMSESPNKTVSEEKAKQYLEEFHQTALEHPELSELKTVTGTNPVFAGANYAAWAVNVAQVIDSETADNLEKTTAALSILPGIGSVMGIADGAVHHNTEEIVAQSIALSSLMVAQAIPLVGELVDIGFAAYNFVESIINLFQVVHNSYNRPAYSPGHKT

SEQ ID NO: 87 - protein, 387 aa, Artificial Sequence
  Description of Artificial Sequence: Synthetic polypeptide
MGADDVVDSSKSFVMENFSSYHGTKPGYVDAIQKGIQKPKSGTQGNYDDDWKGFYSTDNKYDAAGYSVDNENPLSGKAGGVVKVTYPGLTKVLALKVDNAETIKKELGLSLTEPLMEQVGTEEFIKRFGDGASRVVLSLPFAEGSSSVEYINNWEQAKALSVELEINFETRGKRGQDAMYEYMAQACAGNRVRRSVGSSLSCINLDWDVIRDKTKTKIESLKEHGPIKNKMSESPNKTVSEEKAKQYLEEFHQTALEHPELSELKTVTGTNPVFAGANYAAWAVNVAQVIDSETADNLEKTTAALSILPGIGSVMGIADGAVHHNTEEIVAQSIALSSLMVAQAIPLVGELVDIGFAAYNFVESIINLFQVVHNSYNRPAYSPGHKT

SEQ ID NO: 88 - protein, 387 aa, Artificial Sequence
  Description of Artificial Sequence: Synthetic polypeptide
MGADDVVDSSKSFVMENFSSYHGTKPGYVDGIQKGIQKPKSGTQGNYDDDWKGFYSTDNKYDAAGYSVDNENPLSGKAGGVVKVTYPGLTKVLALKVDNAETIKKELGLSLTEPLMEQVGTEEFIKRFGDGASRVVLSLPFAEGSSSVEYINNWEQAKALSVELEINFETRGKRGQDAMYEYMAQACAGNRVRRSVGSSLSCINLDWDVIRDKTKTKIESLKEHGPIKNKMSESPNKTVSEEKAKQYLEEFHQTALEHPELSELKTVTGTNPVFAGANYAAWAVNVAQVIDSETADNLEKTTAALSILPGIGSVMGIADGAVHHNTEEIVAQSIALSSLMVAQAIPLVGELVDIGFAAYNFVESIINLFQVVHNSYNRPAYSPGHKT

SEQ ID NO: 89 - protein, 387 aa, Artificial Sequence
  Description of Artificial Sequence: Synthetic polypeptide
MGADDVVDSSKSFVMENFSSYHGTKPGYVDTIQKGIQKPKSGTQGNYDDDWKGFYSTDNKYDAAGYSVDNENPLSGKAGGVVKVTYPGLTKVLALKVDNAETIKKELGLSLTEPLMEQVGTEEFIKRFGDGASRVVLSLPFAEGSSSVEYINNWEQAKALSVELEINFETRGKRGQDAMYEYMAQACAGNRVRRSVGSSLSCINLDWDVIRDKTKTKIESLKEHGPIKNKMSESPNKTVSEEKAKQYLEEFHQTALEHPELSELKTVTGTNPVFAGANYAAWAVNVAQVIDSETADNLEKTTAALSILPGIGSVMGIADGAVHHNTEEIVAQSIALSSLMVAQAIPLVGELVDIGFAAYNFVESIINLFQVVHNSYNRPAYSPGHKT

SEQ ID NO: 90 - protein, 387 aa, Artificial Sequence
  Description of Artificial Sequence: Synthetic polypeptide
MGADDVVDSSKSFVMENFSSYHGTKPGYVDWIQKGIQKPKSGTQGNYDDDWKGFYSTDNKYDAAGYSVDNENPLSGKAGGVVKVTYPGLTKVLALKVDNAETIKKELGLSLTEPLMEQVGTEEFIKRFGDGASRVVLSLPFAEGSSSVEYINNWEQAKALSVELEINFETRGKRGQDAMYEYMAQACAGNRVRRSVGSSLSCINLDWDVIRDKTKTKIESLKEHGPIKNKMSESPNKTVSEEKAKQYLEEFHQTALEHPELSELKTVTGTNPVFAGANYAAWAVNVAQVIDSETADNLEKTTAALSILPGIGSVMGIADGAVHHNTEEIVAQSIALSSLMVAQAIPLVGELVDIGFAAYNFVESIINLFQVVHNSYNRPAYSPGHKT

SEQ ID NO: 91 - protein, 387 aa, Artificial Sequence
  Description of Artificial Sequence: Synthetic polypeptide
MGADDVVDSSKSFVMENFSSYHGTKPGYVDYIQKGIQKPKSGTQGNYDDDWKGFYSTDNKYDAAGYSVDNENPLSGKAGGVVKVTYPGLTKVLALKVDNAETIKKELGLSLTEPLMEQVGTEEFIKRFGDGASRVVLSLPFAEGSSSVEYINNWEQAKALSVELEINFETRGKRGQDAMYEYMAQACAGNRVRRSVGSSLSCINLDWDVIRDKTKTKIESLKEHGPIKNKMSESPNKTVSEEKAKQYLEEFHQTALEHPELSELKTVTGTNPVFAGANYAAWAVNVAQVIDSETADNLEKTTAALSILPGIGSVMGIADGAVHHNTEEIVAQSIALSSLMVAQAIPLVGELVDIGFAAYNFVESIINLFQVVHNSYNRPAYSPGHKT

SEQ ID NO: 92 - protein, 387 aa, Artificial Sequence
  Description of Artificial Sequence: Synthetic polypeptide
MGADDVVDSSKSFVMENFSSYHGTKPGYVDPIQKGIQKPKSGTQGNYDDDWKGFYSTDNKYDAAGYSVDNENPLSGKAGGVVKVTYPGLTKVLALKVDNAETIKKELGLSLTEPLMEQVGTEEFIKRFGDGASRVVLSLPFAEGSSSVEYINNWEQAKALSVELEINFETRGKRGQDAMYEYMAQACAGNRVRRSVGSSLSCINLDWDVIRDKTKTKIESLKEHGPIKNKMSESPNKTVSEEKAKQYLEEFHQTALEHPELSELKTVTGTNPVFAGANYAAWAVNVAQVIDSETADNLEKTTAALSILPGIGSVMGIADGAVHHNTEEIVAQSIALSSLMVAQAIPLVGELVDIGFAAYNFVESIINLFQVVHNSYNRPAYSPGHKT

SEQ ID NO: 93 - protein, 387 aa, Artificial Sequence
  Description of Artificial Sequence: Synthetic polypeptide
MGADDVVDSSKSFVMENFSSYHGTKPGYVDHIQKGIQKPKSGTQGNYDDDWKGFYSTDNKYDAAGYSVDNENPLSGKAGGVVKVTYPGLTKVLALKVDNAETIKKELGLSLTEPLMEQVGTEEFIKRFGDGASRVVLSLPFAEGSSSVEYINNWEQAKALSVELEINFETRGKRGQDAMYEYMAQACAGNRVRRSVGSSLSCINLDWDVIRDKTKTKIESLKEHGPIKNKMSESPNKTVSEEKAKQYLEEFHQTALEHPELSELKTVTGTNPVFAGANYAAWAVNVAQVIDSETADNLEKTTAALSILPGIGSVMGIADGAVHHNTEEIVAQSIALSSLMVAQAIPLVGELVDIGFAAYNFVESIINLFQVVHNSYNRPAYSPGHKT

SEQ ID NO: 94 - protein, 387 aa, Artificial Sequence
  Description of Artificial Sequence: Synthetic polypeptide
MGADDVVDSSKSFVMENFSSYHGTKPGYVDEIQKGIQKPKSGTQGNYDDDWKGFYSTDNKYDAAGYSVDNENPLSGKAGGVVKVTYPGLTKVLALKVDNAETIKKELGLSLTEPLMEQVGTEEFIKRFGDGASRVVLSLPFAEGSSSVEYINNWEQAKALSVELEINFETRGKRGQDAMYEYMAQACAGNRVRRSVGSSLSCINLDWDVIRDKTKTKIESLKEHGPIKNKMSESPNKTVSEEKAKQYLEEFHQTALEHPELSELKTVTGTNPVFAGANYAAWAVNVAQVIDSETADNLEKTTAALSILPGIGSVMGIADGAVHHNTEEIVAQSIALSSLMVAQAIPLVGELVDIGFAAYNFVESIINLFQVVHNSYNRPAYSPGHKT

SEQ ID NO: 95 - protein, 387 aa, Artificial Sequence
  Description of Artificial Sequence: Synthetic polypeptide
MGADDVVDSSKSFVMENFSSYHGTKPGYVDQIQKGIQKPKSGTQGNYDDDWKGFYSTDNKYDAAGYSVDNENPLSGKAGGVVKVTYPGLTKVLALKVDNAETIKKELGLSLTEPLMEQVGTEEFIKRFGDGASRVVLSLPFAEGSSSVEYINNWEQAKALSVELEINFETRGKRGQDAMYEYMAQACAGNRVRRSVGSSLSCINLDWDVIRDKTKTKIESLKEHGPIKNKMSESPNKTVSEEKAKQYLEEFHQTALEHPELSELKTVTGTNPVFAGANYAAWAVNVAQVIDSETADNLEKTTAALSILPGIGSVMGIADGAVHHNTEEIVAQSIALSSLMVAQAIPLVGELVDIGFAAYNFVESIINLFQVVHNSYNRPAYSPGHKT

SEQ ID NO: 96 - protein, 387 aa, Artificial Sequence
  Description of Artificial Sequence: Synthetic polypeptide
MGADDVVDSSKSFVMENFSSYHGTKPGYVDDIQKGIQKPKSGTQGNYDDDWKGFYSTDNKYDAAGYSVDNENPLSGKAGGVVKVTYPGLTKVLALKVDNAETIKKELGLSLTEPLMEQVGTEEFIKRFGDGASRVVLSLPFAEGSSSVEYINNWEQAKALSVELEINFETRGKRGQDAMYEYMAQACAGNRVRRSVGSSLSCINLDWDVIRDKTKTKIESLKEHGPIKNKMSESPNKTVSEEKAKQYLEEFHQTALEHPELSELKTVTGTNPVFAGANYAAWAVNVAQVIDSETADNLEKTTAALSILPGIGSVMGIADGAVHHNTEEIVAQSIALSSLMVAQAIPLVGELVDIGFAAYNFVESIINLFQVVHNSYNRPAYSPGHKT

SEQ ID NO: 97 - protein, 387 aa, Artificial Sequence
  Description of Artificial Sequence: Synthetic polypeptide
MGADDVVDSSKSFVMENFSSYHGTKPGYVDNIQKGIQKPKSGTQGNYDDDWKGFYSTDNKYDAAGYSVDNENPLSGKAGGVVKVTYPGLTKVLALKVDNAETIKKELGLSLTEPLMEQVGTEEFIKRFGDGASRVVLSLPFAEGSSSVEYINNWEQAKALSVELEINFETRGKRGQDAMYEYMAQACAGNRVRRSVGSSLSCINLDWDVIRDKTKTKIESLKEHGPIKNKMSESPNKTVSEEKAKQYLEEFHQTALEHPELSELKTVTGTNPVFAGANYAAWAVNVAQVIDSETADNLEKTTAALSILPGIGSVMGIADGAVHHNTEEIVAQSIALSSLMVAQAIPLVGELVDIGFAAYNFVESIINLFQVVHNSYNRPAYSPGHKT

SEQ ID NO: 98 - protein, 387 aa, Artificial Sequence
  Description of Artificial Sequence: Synthetic polypeptide
MGADDVVDSSKSFVMENFSSYHGTKPGYVDKIQKGIQKPKSGTQGNYDDDWKGFYSTDNKYDAAGYSVDNENPLSGKAGGVVKVTYPGLTKVLALKVDNAETIKKELGLSLTEPLMEQVGTEEFIKRFGDGASRVVLSLPFAEGSSSVEYINNWEQAKALSVELEINFETRGKRGQDAMYEYMAQACAGNRVRRSVGSSLSCINLDWDVIRDKTKTKIESLKEHGPIKNKMSESPNKTVSEEKAKQYLEEFHQTALEHPELSELKTVTGTNPVFAGANYAAWAVNVAQVIDSETADNLEKTTAALSILPGIGSVMGIADGAVHHNTEEIVAQSIALSSLMVAQAIPLVGELVDIGFAAYNFVESIINLFQVVHNSYNRPAYSPGHKT

SEQ ID NO: 99 - protein, 387 aa, Artificial Sequence
  Description of Artificial Sequence: Synthetic polypeptide
MGADDVVDSSKSFVMENFSSYHGTKPGYVDRIQKGIQKPKSGTQGNYDDDWKGFYSTDNKYDAAGYSVDNENPLSGKAGGVVKVTYPGLTKVLALKVDNAETIKKELGLSLTEPLMEQVGTEEFIKRFGDGASRVVLSLPFAEGSSSVEYINNWEQAKALSVELEINFETRGKRGQDAMYEYMAQACAGNRVRRSVGSSLSCINLDWDVIRDKTKTKIESLKEHGPIKNKMSESPNKTVSEEKAKQYLEEFHQTALEHPELSELKTVTGTNPVFAGANYAAWAVNVAQVIDSETADNLEKTTAALSILPGIGSVMGIADGAVHHNTEEIVAQSIALSSLMVAQAIPLVGELVDIGFAAYNFVESIINLFQVVHNSYNRPAYSPGHKT

SEQ ID NO: 100 - protein, 387 aa, Artificial Sequence
  Description of Artificial Sequence: Synthetic polypeptide
MGADDVVDSSKSFVMENFSSYHGTKPGYVDSIQKGIQKPKSGTQGNYDDDWKGFYSTDNKYDAAGYSVDNENPLSGKAGGVVKVTYPGLTKVLALKVDNAETIKKELGLSLTEPLMEQVGTEEFIKRFGDGASRVVLSLPFAEGSSSVEYINNWEQAKALSVELEINFETRGKRGQDAMYEYMAQACAGNRVRRSVGSSLSCINLDWDVIRDKTKTKIESLKEHGPIKNKMSESPNKTVSEEKAKQYLEEFHQTALEHPELSELKTVTGTNPVFAGANYAAWAVNVAQVFDSETADNLEKTTAALSILPGIGSVMGIADGAVHHNTEEIVAQSIALSSLMVAQAIPLVGELVDIGFAAYNFVESIINLFQVVHNSYNRPAYSPGHKT

SEQ ID NO: 101 - protein, 387 aa, Artificial Sequence
  Description of Artificial Sequence: Synthetic polypeptide
MGADDVVDSSKSFVMENFSSYHGTKPGYVDSIQKGIQKPKSGTQGNYDDDWKGFYSTDNKYDAAGYSVDNENPLSGKAGGVVKVTYPGLTKVLALKVDNAETIKKELGLSLTEPLMEQVGTEEFIKRFGDGASRVVLSLPFAEGSSSVEYINNWEQAKALSVELEINFETRGKRGQDAMYEYMAQACAGNRVRRSVGSSLSCINLDWDVIRDKTKTKIESLKEHGPIKNKMSESPNKTVSEEKAKQYLEEFHQTALEHPELSELKTVTGTNPVFAGANYAAWAVNVAQVCDSETADNLEKTTAALSILPGIGSVMGIADGAVHHNTEEIVAQSIALSSLMVAQAIPLVGELVDIGFAAYNFVESIINLFQVVHNSYNRPAYSPGHKT

SEQ ID NO: 102 - protein, 387 aa, Artificial Sequence
  Description of Artificial Sequence: Synthetic polypeptide
MGADDVVDSSKSFVMENFSSYHGTKPGYVDSIQKGIQKPKSGTQGNYDDDWKGFYSTDNKYDAAGYSVDNENPLSGKAGGVVKVTYPGLTKVLALKVDNAETIKKELGLSLTEPLMEQVGTEEFIKRFGDGASRVVLSLPFAEGSSSVEYINNWEQAKALSVELEINFETRGKRGQDAMYEYMAQACAGNRVRRSVGSSLSCINLDWDVIRDKTKTKIESLKEHGPIKNKMSESPNKTVSEEKAKQYLEEFHQTALEHPELSELKTVTGTNPVFAGANYAAWAVNVAQVMDSETADNLEKTTAALSILPGIGSVMGIADGAVHHNTEEIVAQSIALSSLMVAQAIPLVGELVDIGFAAYNFVESIINLFQVVHNSYNRPAYSPGHKT

SEQ ID NO: 103 - protein, 387 aa, Artificial Sequence
  Description of Artificial Sequence: Synthetic polypeptide
MGADDVVDSSKSFVMENFSSYHGTKPGYVDSIQKGIQKPKSGTQGNYDDDWKGFYSTDNKYDAAGYSVDNENPLSGKAGGVVKVTYPGLTKVLALKVDNAETIKKELGLSLTEPLMEQVGTEEFIKRFGDGASRVVLSLPFAEGSSSVEYINNWEQAKALSVELEINFETRGKRGQDAMYEYMAQACAGNRVRRSVGSSLSCINLDWDVIRDKTKTKIESLKEHGPIKNKMSESPNKTVSEEKAKQYLEEFHQTALEHPELSELKTVTGTNPVFAGANYAAWAVNVAQVTDSETADNLEKTTAALSILPGIGSVMGIADGAVHHNTEEIVAQSIALSSLMVAQAIPLVGELVDIGFAAYNFVESIINLFQVVHNSYNRPAYSPGHKT

SEQ ID NO: 104 - protein, 387 aa, Artificial Sequence
  Description of Artificial Sequence: Synthetic polypeptide
MGADDVVDSSKSFVMENFSSYHGTKPGYVDSIQKGIQKPKSGTQGNYDDDWKGFYSTDNKYDAAGYSVDNENPLSGKAGGVVKVTYPGLTKVLALKVDNAETIKKELGLSLTEPLMEQVGTEEFIKRFGDGASRVVLSLPFAEGSSSVEYINNWEQAKALSVELEINFETRGKRGQDAMYEYMAQACAGNRVRRSVGSSLSCINLDWDVIRDKTKTKIESLKEHGPIKNKMSESPNKTVSEEKAKQYLEEFHQTALEHPELSELKTVTGTNPVFAGANYAAWAVNVAQVWDSETADNLEKTTAALSILPGIGSVMGIADGAVHHNTEEIVAQSIALSSLMVAQAIPLVGELVDIGFAAYNFVESIINLFQVVHNSYNRPAYSPGHKT

SEQ ID NO: 105 - protein, 387 aa, Artificial Sequence
  Description of Artificial Sequence: Synthetic polypeptide
MGADDVVDSSKSFVMENFSSYHGTKPGYVDSIQKGIQKPKSGTQGNYDDDWKGFYSTDNKYDAAGYSVDNENPLSGKAGGVVKVTYPGLTKVLALKVDNAETIKKELGLSLTEPLMEQVGTEEFIKRFGDGASRVVLSLPFAEGSSSVEYINNWEQAKALSVELEINFETRGKRGQDAMYEYMAQACAGNRVRRSVGSSLSCINLDWDVIRDKTKTKIESLKEHGPIKNKMSESPNKTVSEEKAKQYLEEFHQTALEHPELSELKTVTGTNPVFAGANYAAWAVNVAQVYDSETADNLEKTTAALSILPGIGSVMGIADGAVHHNTEEIVAQSIALSSLMVAQAIPLVGELVDIGFAAYNFVESIINLFQVVHNSYNRPAYSPGHKT

SEQ ID NO: 106 - protein, 387 aa, Artificial Sequence
  Description of Artificial Sequence: Synthetic polypeptide
MGADDVVDSSKSFVMENFSSYHGTKPGYVDSIQKGIQKPKSGTQGNYDDDWKGFYSTDNKYDAAGYSVDNENPLSGKAGGVVKVTYPGLTKVLALKVDNAETIKKELGLSLTEPLMEQVGTEEFIKRFGDGASRVVLSLPFAEGSSSVEYINNWEQAKALSVELEINFETRGKRGQDAMYEYMAQACAGNRVRRSVGSSLSCINLDWDVIRDKTKTKIESLKEHGPIKNKMSESPNKTVSEEKAKQYLEEFHQTALEHPELSELKTVTGTNPVFAGANYAAWAVNVAQVPDSETADNLEKTTAALSILPGIGSVMGIADGAVHHNTEEIVAQSIALSSLMVAQAIPLVGELVDIGFAAYNFVESIINLFQVVHNSYNRPAYSPGHKT

SEQ ID NO: 107 - protein, 387 aa, Artificial Sequence
  Description of Artificial Sequence: Synthetic polypeptide
MGADDVVDSSKSFVMENFSSYHGTKPGYVDSIQKGIQKPKSGTQGNYDDDWKGFYSTDNKYDAAGYSVDNENPLSGKAGGVVKVTYPGLTKVLALKVDNAETIKKELGLSLTEPLMEQVGTEEFIKRFGDGASRVVLSLPFAEGSSSVEYINNWEQAKALSVELEINFETRGKRGQDAMYEYMAQACAGNRVRRSVGSSLSCINLDWDVIRDKTKTKIESLKEHGPIKNKMSESPNKTVSEEKAKQYLEEFHQTALEHPELSELKTVTGTNPVFAGANYAAWAVNVAQVHDSETADNLEKTTAALSILPGIGSVMGIADGAVHHNTEEIVAQSIALSSLMVAQAIPLVGELVDIGFAAYNFVESIINLFQVVHNSYNRPAYSPGHKT

SEQ ID NO: 108 - protein, 387 aa, Artificial Sequence
  Description of Artificial Sequence: Synthetic polypeptide
MGADDVVDSSKSFVMENFSSYHGTKPGYVDSIQKGIQKPKSGTQGNYDDDWKGFYSTDNKYDAAGYSVDNENPLSGKAGGVVKVTYPGLTKVLALKVDNAETIKKELGLSLTEPLMEQVGTEEFIKRFGDGASRVVLSLPFAEGSSSVEYINNWEQAKALSVELEINFETRGKRGQDAMYEYMAQACAGNRVRRSVGSSLSCINLDWDVIRDKTKTKIESLKEHGPIKNKMSESPNKTVSEEKAKQYLEEFHQTALEHPELSELKTVTGTNPVFAGANYAAWAVNVAQVEDSETADNLEKTTAALSILPGIGSVMGIADGAVHHNTEEIVAQSIALSSLMVAQAIPLVGELVDIGFAAYNFVESIINLFQVVHNSYNRPAYSPGHKT

SEQ ID NO: 109 - protein, 387 aa, Artificial Sequence
  Description of Artificial Sequence: Synthetic polypeptide
MGADDVVDSSKSFVMENFSSYHGTKPGYVDSIQKGIQKPKSGTQGNYDDDWKGFYSTDNKYDAAGYSVDNENPLSGKAGGVVKVTYPGLTKVLALKVDNAETIKKELGLSLTEPLMEQVGTEEFIKRFGDGASRVVLSLPFAEGSSSVEYINNWEQAKALSVELEINFETRGKRGQDAMYEYMAQACAGNRVRRSVGSSLSCINLDWDVIRDKTKTKIESLKEHGPIKNKMSESPNKTVSEEKAKQYLEEFHQTALEHPELSELKTVTGTNPVFAGANYAAWAVNVAQVQDSETADNLEKTTAALSILPGIGSVMGIADGAVHHNTEEIVAQSIALSSLMVAQAIPLVGELVDIGFAAYNFVESIINLFQVVHNSYNRPAYSPGHKT

SEQ ID NO: 110 - protein, 387 aa, Artificial Sequence
  Description of Artificial Sequence: Synthetic polypeptide
MGADDVVDSSKSFVMENFSSYHGTKPGYVDSIQKGIQKPKSGTQGNYDDDWKGFYSTDNKYDAAGYSVDNENPLSGKAGGVVKVTYPGLTKVLALKVDNAETIKKELGLSLTEPLMEQVGTEEFIKRFGDGASRVVLSLPFAEGSSSVEYINNWEQAKALSVELEINFETRGKRGQDAMYEYMAQACAGNRVRRSVGSSLSCINLDWDVIRDKTKTKIESLKEHGPIKNKMSESPNKTVSEEKAKQYLEEFHQTALEHPELSELKTVTGTNPVFAGANYAAWAVNVAQVDDSETADNLEKTTAALSILPGIGSVMGIADGAVHHNTEEIVAQSIALSSLMVAQAIPLVGELVDIGFAAYNFVESIINLFQVVHNSYNRPAYSPGHKT

SEQ ID NO: 111 - protein, 387 aa, Artificial Sequence
  Description of Artificial Sequence: Synthetic polypeptide
MGADDVVDSSKSFVMENFSSYHGTKPGYVDSIQKGIQKPKSGTQGNYDDDWKGFYSTDNKYDAAGYSVDNENPLSGKAGGVVKVTYPGLTKVLALKVDNAETIKKELGLSLTEPLMEQVGTEEFIKRFGDGASRVVLSLPFAEGSSSVEYINNWEQAKALSVELEINFETRGKRGQDAMYEYMAQACAGNRVRRSVGSSLSCINLDWDVIRDKTKTKIESLKEHGPIKNKMSESPNKTVSEEKAKQYLEEFHQTALEHPELSELKTVTGTNPVFAGANYAAWAVNVAQVNDSETADNLEKTTAALSILPGIGSVMGIADGAVHHNTEEIVAQSIALSSLMVAQAIPLVGELVDIGFAAYNFVESIINLFQVVHNSYNRPAYSPGHKT

SEQ ID NO: 112 - protein, 387 aa, Artificial Sequence
  Description of Artificial Sequence: Synthetic polypeptide
MGADDVVDSSKSFVMENFSSYHGTKPGYVDSIQKGIQKPKSGTQGNYDDDWKGFYSTDNKYDAAGYSVDNENPLSGKAGGVVKVTYPGLTKVLALKVDNAETIKKELGLSLTEPLMEQVGTEEFIKRFGDGASRVVLSLPFAEGSSSVEYINNWEQAKALSVELEINFETRGKRGQDAMYEYMAQACAGNRVRRSVGSSLSCINLDWDVIRDKTKTKIESLKEHGPIKNKMSESPNKTVSEEKAKQYLEEFHQTALEHPELSELKTVTGTNPVFAGANYAAWAVNVAQVKDSETADNLEKTTAALSILPGIGSVMGIADGAVHHNTEEIVAQSIALSSLMVAQAIPLVGELVDIGFAAYNFVESIINLFQVVHNSYNRPAYSPGHKT

SEQ ID NO: 113 - protein, 387 aa, Artificial Sequence
  Description of Artificial Sequence: Synthetic polypeptide
MGADDVVDSSKSFVMENFSSYHGTKPGYVDSIQKGIQKPKSGTQGNYDDDWKGFYSTDNKYDAAGYSVDNENPLSGKAGGVVKVTYPGLTKVLALKVDNAETIKKELGLSLTEPLMEQVGTEEFIKRFGDGASRVVLSLPFAEGSSSVEYINNWEQAKALSVELEINFETRGKRGQDAMYEYMAQACAGNRVRRSVGSSLSCINLDWDVIRDKTKTKIESLKEHGPIKNKMSESPNKTVSEEKAKQYLEEFHQTALEHPELSELKTVTGTNPVFAGANYAAWAVNVAQVRDSETADNLEKTTAALSILPGIGSVMGIADGAVHHNTEEIVAQSIALSSLMVAQAIPLVGELVDIGFAAYNFVESIINLFQVVHNSYNRPAYSPGHKT

SEQ ID NO: 114 - protein, 387 aa, Artificial Sequence
  Description of Artificial Sequence: Synthetic polypeptide
MGADDVVDSSKSFVMENFSSYHGTKPGYVDSIQKGIQKPKSGTQGNYDDDWKGFYSTDNKYDAAGYSVDNENPLSGKAGGVVKVTYPGLTKVLALKVDNAETIKKELGLSLTEPLMEQVGTEEFIKRFGDGASRVVLSLPFAEGSSSVEYINNWEQAKALSVELEINFETRGKRGQDAMYEYMAQACAGNRVRRSVGSSLSCINLDWDVIRDKTKTKIESLKEHGPIKNKMSESPNKTVSEEKAKQYLEEFHQTALEHPELSELKTVTGTNPVFAGANYAAWAVNVAQVIISETADNLEKTTAALSILPGIGSVMGIADGAVHHNTEEIVAQSIALSSLMVAQAIPLVGELVDIGFAAYNFVESIINLFQVVHNSYNRPAYSPGHKT

SEQ ID NO: 115 - protein, 387 aa, Artificial Sequence
  Description of Artificial Sequence: Synthetic polypeptide
MGADDVVDSSKSFVMENFSSYHGTKPGYVDSIQKGIQKPKSGTQGNYDDDWKGFYSTDNKYDAAGYSVDNENPLSGKAGGVVKVTYPGLTKVLALKVDNAETIKKELGLSLTEPLMEQVGTEEFIKRFGDGASRVVLSLPFAEGSSSVEYINNWEQAKALSVELEINFETRGKRGQDAMYEYMAQACAGNRVRRSVGSSLSCINLDWDVIRDKTKTKIESLKEHGPIKNKMSESPNKTVSEEKAKQYLEEFHQTALEHPELSELKTVTGTNPVFAGANYAAWAVNVAQVIVSETADNLEKTTAALSILPGIGSVMGIADGAVHHNTEEIVAQSIALSSLMVAQAIPLVGELVDIGFAAYNFVESIINLFQVVHNSYNRPAYSPGHKT

SEQ ID NO: 116 - protein, 387 aa, Artificial Sequence
  Description of Artificial Sequence: Synthetic polypeptide
MGADDVVDSSKSFVMENFSSYHGTKPGYVDSIQKGIQKPKSGTQGNYDDDWKGFYSTDNKYDAAGYSVDNENPLSGKAGGVVKVTYPGLTKVLALKVDNAETIKKELGLSLTEPLMEQVGTEEFIKRFGDGASRVVLSLPFAEGSSSVEYINNWEQAKALSVELEINFETRGKRGQDAMYEYMAQACAGNRVRRSVGSSLSCINLDWDVIRDKTKTKIESLKEHGPIKNKMSESPNKTVSEEKAKQYLEEFHQTALEHPELSELKTVTGTNPVFAGANYAAWAVNVAQVILSETADNLEKTTAALSILPGIGSVMGIADGAVHHNTEEIVAQSIALSSLMVAQAIPLVGELVDIGFAAYNFVESIINLFQVVHNSYNRPAYSPGHKT

SEQ ID NO: 117 - protein, 387 aa, Artificial Sequence
  Description of Artificial Sequence: Synthetic polypeptide
MGADDVVDSSKSFVMENFSSYHGTKPGYVDSIQKGIQKPKSGTQGNYDDDWKGFYSTDNKYDAAGYSVDNENPLSGKAGGVVKVTYPGLTKVLALKVDNAETIKKELGLSLTEPLMEQVGTEEFIKRFGDGASRVVLSLPFAEGSSSVEYINNWEQAKALSVELEINFETRGKRGQDAMYEYMAQACAGNRVRRSVGSSLSCINLDWDVIRDKTKTKIESLKEHGPIKNKMSESPNKTVSEEKAKQYLEEFHQTALEHPELSELKTVTGTNPVFAGANYAAWAVNVAQVIFSETADNLEKTTAALSILPGIGSVMGIADGAVHHNTEEIVAQSIALSSLMVAQAIPLVGELVDIGFAAYNFVESIINLFQVVHNSYNRPAYSPGHKT

SEQ ID NO: 118 - protein, 387 aa, Artificial Sequence
  Description of Artificial Sequence: Synthetic polypeptide
MGADDVVDSSKSFVMENFSSYHGTKPGYVDSIQKGIQKPKSGTQGNYDDDWKGFYSTDNKYDAAGYSVDNENPLSGKAGGVVKVTYPGLTKVLALKVDNAETIKKELGLSLTEPLMEQVGTEEFIKRFGDGASRVVLSLPFAEGSSSVEYINNWEQAKALSVELEINFETRGKRGQDAMYEYMAQACAGNRVRRSVGSSLSCINLDWDVIRDKTKTKIESLKEHGPIKNKMSESPNKTVSEEKAKQYLEEFHQTALEHPELSELKTVTGTNPVFAGANYAAWAVNVAQVICSETADNLEKTTAALSILPGIGSVMGIADGAVHHNTEEIVAQSIALSSLMVAQAIPLVGELVDIGFAAYNFVESIINLFQVVHNSYNRPAYSPGHKT

SEQ ID NO: 119 - protein, 387 aa, Artificial Sequence
  Description of Artificial Sequence: Synthetic polypeptide
MGADDVVDSSKSFVMENFSSYHGTKPGYVDSIQKGIQKPKSGTQGNYDDDWKGFYSTDNKYDAAGYSVDNENPLSGKAGGVVKVTYPGLTKVLALKVDNAETIKKELGLSLTEPLMEQVGTEEFIKRFGDGASRVVLSLPFAEGSSSVEYINNWEQAKALSVELEINFETRGKRGQDAMYEYMAQACAGNRVRRSVGSSLSCINLDWDVIRDKTKTKIESLKEHGPIKNKMSESPNKTVSEEKAKQYLEEFHQTALEHPELSELKTVTGTNPVFAGANYAAWAVNVAQVIMSETADNLEKTTAALSILPGIGSVMGIADGAVHHNTEEIVAQSIALSSLMVAQAIPLVGELVDIGFAAYNFVESIINLFQVVHNSYNRPAYSPGHKT

SEQ ID NO: 120 - protein, 387 aa, Artificial Sequence
  Description of Artificial Sequence: Synthetic polypeptide
MGADDVVDSSKSFVMENFSSYHGTKPGYVDSIQKGIQKPKSGTQGNYDDDWKGFYSTDNKYDAAGYSVDNENPLSGKAGGVVKVTYPGLTKVLALKVDNAETIKKELGLSLTEPLMEQVGTEEFIKRFGDGASRVVLSLPFAEGSSSVEYINNWEQAKALSVELEINFETRGKRGQDAMYEYMAQACAGNRVRRSVGSSLSCINLDWDVIRDKTKTKIESLKEHGPIKNKMSESPNKTVSEEKAKQYLEEFHQTALEHPELSELKTVTGTNPVFAGANYAAWAVNVAQVIASETADNLEKTTAALSILPGIGSVMGIADGAVHHNTEEIVAQSIALSSLMVAQAIPLVGELVDIGFAAYNFVESIINLFQVVHNSYNRPAYSPGHKT

SEQ ID NO: 121 - protein, 387 aa, Artificial Sequence
  Description of Artificial Sequence: Synthetic polypeptide
MGADDVVDSSKSFVMENFSSYHGTKPGYVDSIQKGIQKPKSGTQGNYDDDWKGFYSTDNKYDAAGYSVDNENPLSGKAGGVVKVTYPGLTKVLALKVDNAETIKKELGLSLTEPLMEQVGTEEFIKRFGDGASRVVLSLPFAEGSSSVEYINNWEQAKALSVELEINFETRGKRGQDAMYEYMAQACAGNRVRRSVGSSLSCINLDWDVIRDKTKTKIESLKEHGPIKNKMSESPNKTVSEEKAKQYLEEFHQTALEHPELSELKTVTGTNPVFAGANYAAWAVNVAQVIGSETADNLEKTTAALSILPGIGSVMGIADGAVHHNTEEIVAQSIALSSLMVAQAIPLVGELVDIGFAAYNFVESIINLFQVVHNSYNRPAYSPGHKT

SEQ ID NO: 122 - protein, 387 aa, Artificial Sequence
  Description of Artificial Sequence: Synthetic polypeptide
MGADDVVDSSKSFVMENFSSYHGTKPGYVDSIQKGIQKPKSGTQGNYDDDWKGFYSTDNKYDAAGYSVDNENPLSGKAGGVVKVTYPGLTKVLALKVDNAETIKKELGLSLTEPLMEQVGTEEFIKRFGDGASRVVLSLPFAEGSSSVEYINNWEQAKALSVELEINFETRGKRGQDAMYEYMAQACAGNRVRRSVGSSLSCINLDWDVIRDKTKTKIESLKEHGPIKNKMSESPNKTVSEEKAKQYLEEFHQTALEHPELSELKTVTGTNPVFAGANYAAWAVNVAQVITSETADNLEKTTAALSILPGIGSVMGIADGAVHHNTEEIVAQSIALSSLMVAQAIPLVGELVDIGFAAYNFVESIINLFQVVHNSYNRPAYSPGHKT

SEQ ID NO: 123 - protein, 387 aa, Artificial Sequence
  Description of Artificial Sequence: Synthetic polypeptide
MGADDVVDSSKSFVMENFSSYHGTKPGYVDSIQKGIQKPKSGTQGNYDDDWKGFYSTDNKYDAAGYSVDNENPLSGKAGGVVKVTYPGLTKVLALKVDNAETIKKELGLSLTEPLMEQVGTEEFIKRFGDGASRVVLSLPFAEGSSSVEYINNWEQAKALSVELEINFETRGKRGQDAMYEYMAQACAGNRVRRSVGSSLSCINLDWDVIRDKTKTKIESLKEHGPIKNKMSESPNKTVSEEKAKQYLEEFHQTALEHPELSELKTVTGTNPVFAGANYAAWAVNVAQVIWSETADNLEKTTAALSILPGIGSVMGIADGAVHHNTEEIVAQSIALSSLMVAQAIPLVGELVDIGFAAYNFVESIINLFQVVHNSYNRPAYSPGHKT

SEQ ID NO: 124 - protein, 387 aa, Artificial Sequence
  Description of Artificial Sequence: Synthetic polypeptide
MGADDVVDSSKSFVMENFSSYHGTKPGYVDSIQKGIQKPKSGTQGNYDDDWKGFYSTDNKYDAAGYSVDNENPLSGKAGGVVKVTYPGLTKVLALKVDNAETIKKELGLSLTEPLMEQVGTEEFIKRFGDGASRVVLSLPFAEGSSSVEYINNWEQAKALSVELEINFETRGKRGQDAMYEYMAQACAGNRVRRSVGSSLSCINLDWDVIRDKTKTKIESLKEHGPIKNKMSESPNKTVSEEKAKQYLEEFHQTALEHPELSELKTVTGTNPVFAGANYAAWAVNVAQVIYSETADNLEKTTAALSILPGIGSVMGIADGAVHHNTEEIVAQSIALSSLMVAQAIPLVGELVDIGFAAYNFVESIINLFQVVHNSYNRPAYSPGHKT

SEQ ID NO: 125 - protein, 387 aa, Artificial Sequence
  Description of Artificial Sequence: Synthetic polypeptide
MGADDVVDSSKSFVMENFSSYHGTKPGYVDSIQKGIQKPKSGTQGNYDDDWKGFYSTDNKYDAAGYSVDNENPLSGKAGGVVKVTYPGLTKVLALKVDNAETIKKELGLSLTEPLMEQVGTEEFIKRFGDGASRVVLSLPFAEGSSSVEYINNWEQAKALSVELEINFETRGKRGQDAMYEYMAQACAGNRVRRSVGSSLSCINLDWDVIRDKTKTKIESLKEHGPIKNKMSESPNKTVSEEKAKQYLEEFHQTALEHPELSELKTVTGTNPVFAGANYAAWAVNVAQVIPSETADNLEKTTAALSILPGIGSVMGIADGAVHHNTEEIVAQSIALSSLMVAQAIPLVGELVDIGFAAYNFVESIINLFQVVHNSYNRPAYSPGHKT

SEQ ID NO: 126 - protein, 387 aa, Artificial Sequence
  Description of Artificial Sequence: Synthetic polypeptide
MGADDVVDSSKSFVMENFSSYHGTKPGYVDSIQKGIQKPKSGTQGNYDDDWKGFYSTDNKYDAAGYSVDNENPLSGKAGGVVKVTYPGLTKVLALKVDNAETIKKELGLSLTEPLMEQVGTEEFIKRFGDGASRVVLSLPFAEGSSSVEYINNWEQAKALSVELEINFETRGKRGQDAMYEYMAQACAGNRVRRSVGSSLSCINLDWDVIRDKTKTKIESLKEHGPIKNKMSESPNKTVSEEKAKQYLEEFHQTALEHPELSELKTVTGTNPVFAGANYAAWAVNVAQVIHSETADNLEKTTAALSILPGIGSVMGIADGAVHHNTEEIVAQSIALSSLMVAQAIPLVGELVDIGFAAYNFVESIINLFQVVHNSYNRPAYSPGHKT

SEQ ID NO: 127 - protein, 387 aa, Artificial Sequence
  Description of Artificial Sequence: Synthetic polypeptide
MGADDVVDSSKSFVMENFSSYHGTKPGYVDSIQKGIQKPKSGTQGNYDDDWKGFYSTDNKYDAAGYSVDNENPLSGKAGGVVKVTYPGLTKVLALKVDNAETIKKELGLSLTEPLMEQVGTEEFIKRFGDGASRVVLSLPFAEGSSSVEYINNWEQAKALSVELEINFETRGKRGQDAMYEYMAQACAGNRVRRSVGSSLSCINLDWDVIRDKTKTKIESLKEHGPIKNKMSESPNKTVSEEKAKQYLEEFHQTALEHPELSELKTVTGTNPVFAGANYAAWAVNVAQVIQSETADNLEKTTAALSILPGIGSVMGIADGAVHHNTEEIVAQSIALSSLMVAQAIPLVGELVDIGFAAYNFVESIINLFQVVHNSYNRPAYSPGHKT

SEQ ID NO: 128 - protein, 387 aa, Artificial Sequence
  Description of Artificial Sequence: Synthetic polypeptide
MGADDVVDSSKSFVMENFSSYHGTKPGYVDSIQKGIQKPKSGTQGNYDDDWKGFYSTDNKYDAAGYSVDNENPLSGKAGGVVKVTYPGLTKVLALKVDNAETIKKELGLSLTEPLMEQVGTEEFIKRFGDGASRVVLSLPFAEGSSSVEYINNWEQAKALSVELEINFETRGKRGQDAMYEYMAQACAGNRVRRSVGSSLSCINLDWDVIRDKTKTKIESLKEHGPIKNKMSESPNKTVSEEKAKQYLEEFHQTALEHPELSELKTVTGTNPVFAGANYAAWAVNVAQVINSETADNLEKTTAALSILPGIGSVMGIADGAVHHNTEEIVAQSIALSSLMVAQAIPLVGELVDIGFAAYNFVESIINLFQVVHNSYNRPAYSPGHKT

SEQ ID NO: 129 - protein, 387 aa, Artificial Sequence
  Description of Artificial Sequence: Synthetic polypeptide
MGADDVVDSSKSFVMENFSSYHGTKPGYVDSIQKGIQKPKSGTQGNYDDDWKGFYSTDNKYDAAGYSVDNENPLSGKAGGVVKVTYPGLTKVLALKVDNAETIKKELGLSLTEPLMEQVGTEEFIKRFGDGASRVVLSLPFAEGSSSVEYINNWEQAKALSVELEINFETRGKRGQDAMYEYMAQACAGNRVRRSVGSSLSCINLDWDVIRDKTKTKIESLKEHGPIKNKMSESPNKTVSEEKAKQYLEEFHQTALEHPELSELKTVTGTNPVFAGANYAAWAVNVAQVIKSETADNLEKTTAALSILPGIGSVMGIADGAVHHNTEEIVAQSIALSSLMVAQAIPLVGELVDIGFAAYNFVESIINLFQVVHNSYNRPAYSPGHKT

SEQ ID NO: 130 - protein, 387 aa, Artificial Sequence
  Description of Artificial Sequence: Synthetic polypeptide
MGADDVVDSSKSFVMENFSSYHGTKPGYVDSIQKGIQKPKSGTQGNYDDDWKGFYSTDNKYDAAGYSVDNENPLSGKAGGVVKVTYPGLTKVLALKVDNAETIKKELGLSLTEPLMEQVGTEEFIKRFGDGASRVVLSLPFAEGSSSVEYINNWEQAKALSVELEINFETRGKRGQDAMYEYMAQACAGNRVRRSVGSSLSCINLDWDVIRDKTKTKIESLKEHGPIKNKMSESPNKTVSEEKAKQYLEEFHQTALEHPELSELKTVTGTNPVFAGANYAAWAVNVAQVIRSETADNLEKTTAALSILPGIGSVMGIADGAVHHNTEEIVAQSIALSSLMVAQAIPLVGELVDIGFAAYNFVESIINLFQVVHNSYNRPAYSPGHKT

SEQ ID NO: 131 - protein, 387 aa, Artificial Sequence
  Description of Artificial Sequence: Synthetic polypeptide
MGADDVVDSSKSFVMENFSSYHGTKPGYVDSIQKGIQKPKSGTQGNYDDDWKGFYSTDNKYDAAGYSVDNENPLSGKAGGVVKVTYPGLTKVLALKVDNAETIKKELGLSLTEPLMEQVGTEEFIKRFGDGASRVVLSLPFAEGSSSVEYINNWEQAKALSVELEINFETRGKRGQDAMYEYMAQACAGNRVRRSVGSSLSCINLDWDVIRDKTKTKIESLKEHGPIKNKMSESPNKTVSEEKAKQYLEEFHQTALEHPELSELKTVTGTNPVFAGANYAAWAVNVAQVIDIETADNLEKTTAALSILPGIGSVMGIADGAVHHNTEEIVAQSIALSSLMVAQAIPLVGELVDIGFAAYNFVESIINLFQVVHNSYNRPAYSPGHKT

SEQ ID NO: 132 - protein, 387 aa, Artificial Sequence
  Description of Artificial Sequence: Synthetic polypeptide
MGADDVVDSSKSFVMENFSSYHGTKPGYVDSIQKGIQKPKSGTQGNYDDDWKGFYSTDNKYDAAGYSVDNENPLSGKAGGVVKVTYPGLTKVLALKVDNAETIKKELGLSLTEPLMEQVGTEEFIKRFGDGASRVVLSLPFAEGSSSVEYINNWEQAKALSVELEINFETRGKRGQDAMYEYMAQACAGNRVRRSVGSSLSCINLDWDVIRDKTKTKIESLKEHGPIKNKMSESPNKTVSEEKAKQYLEEFHQTALEHPELSELKTVTGTNPVFAGANYAAWAVNVAQVIDFETADNLEKTTAALSILPGIGSVMGIADGAVHHNTEEIVAQSIALSSLMVAQAIPLVGELVDIGFAAYNFVESIINLFQVVHNSYNRPAYSPGHKT

SEQ ID NO: 133 - protein, 387 aa, Artificial Sequence
  Description of Artificial Sequence: Synthetic polypeptide
MGADDVVDSSKSFVMENFSSYHGTKPGYVDSIQKGIQKPKSGTQGNYDDDWKGFYSTDNKYDAAGYSVDNENPLSGKAGGVVKVTYPGLTKVLALKVDNAETIKKELGLSLTEPLMEQVGTEEFIKRFGDGASRVVLSLPFAEGSSSVEYINNWEQAKALSVELEINFETRGKRGQDAMYEYMAQACAGNRVRRSVGSSLSCINLDWDVIRDKTKTKIESLKEHGPIKNKMSESPNKTVSEEKAKQYLEEFHQTALEHPELSELKTVTGTNPVFAGANYAAWAVNVAQVIDCETADNLEKTTAALSILPGIGSVMGIADGAVHHNTEEIVAQSIALSSLMVAQAIPLVGELVDIGFAAYNFVESIINLFQVVHNSYNRPAYSPGHKT

SEQ ID NO: 134 - protein, 387 aa, Artificial Sequence
  Description of Artificial Sequence: Synthetic polypeptide
MGADDVVDSSKSFVMENFSSYHGTKPGYVDSIQKGIQKPKSGTQGNYDDDWKGFYSTDNKYDAAGYSVDNENPLSGKAGGVVKVTYPGLTKVLALKVDNAETIKKELGLSLTEPLMEQVGTEEFIKRFGDGASRVVLSLPFAEGSSSVEYINNWEQAKALSVELEINFETRGKRGQDAMYEYMAQACAGNRVRRSVGSSLSCINLDWDVIRDKTKTKIESLKEHGPIKNKMSESPNKTVSEEKAKQYLEEFHQTALEHPELSELKTVTGTNPVFAGANYAAWAVNVAQVIDMETADNLEKTTAALSILPGIGSVMGIADGAVHHNTEEIVAQSIALSSLMVAQAIPLVGELVDIGFAAYNFVESIINLFQVVHNSYNRPAYSPGHKT

SEQ ID NO: 135 - protein, 387 aa, Artificial Sequence
  Description of Artificial Sequence: Synthetic polypeptide
MGADDVVDSSKSFVMENFSSYHGTKPGYVDSIQKGIQKPKSGTQGNYDDDWKGFYSTDNKYDAAGYSVDNENPLSGKAGGVVKVTYPGLTKVLALKVDNAETIKKELGLSLTEPLMEQVGTEEFIKRFGDGASRVVLSLPFAEGSSSVEYINNWEQAKALSVELEINFETRGKRGQDAMYEYMAQACAGNRVRRSVGSSLSCINLDWDVIRDKTKTKIESLKEHGPIKNKMSESPNKTVSEEKAKQYLEEFHQTALEHPELSELKTVTGTNPVFAGANYAAWAVNVAQVIDAETADNLEKTTAALSILPGIGSVMGIADGAVHHNTEEIVAQSIALSSLMVAQAIPLVGELVDIGFAAYNFVESIINLFQVVHNSYNRPAYSPGHKT

SEQ ID NO: 136 - protein, 387 aa, Artificial Sequence
  Description of Artificial Sequence: Synthetic polypeptide
MGADDVVDSSKSFVMENFSSYHGTKPGYVDSIQKGIQKPKSGTQGNYDDDWKGFYSTDNKYDAAGYSVDNENPLSGKAGGVVKVTYPGLTKVLALKVDNAETIKKELGLSLTEPLMEQVGTEEFIKRFGDGASRVVLSLPFAEGSSSVEYINNWEQAKALSVELEINFETRGKRGQDAMYEYMAQACAGNRVRRSVGSSLSCINLDWDVIRDKTKTKIESLKEHGPIKNKMSESPNKTVSEEKAKQYLEEFHQTALEHPELSELKTVTGTNPVFAGANYAAWAVNVAQVIDGETADNLEKTTAALSILPGIGSVMGIADGAVHHNTEEIVAQSIALSSLMVAQAIPLVGELVDIGFAAYNFVESIINLFQVVHNSYNRPAYSPGHKT

SEQ ID NO: 137 - protein, 387 aa, Artificial Sequence
  Description of Artificial Sequence: Synthetic polypeptide
MGADDVVDSSKSFVMENFSSYHGTKPGYVDSIQKGIQKPKSGTQGNYDDDWKGFYSTDNKYDAAGYSVDNENPLSGKAGGVVKVTYPGLTKVLALKVDNAETIKKELGLSLTEPLMEQVGTEEFIKRFGDGASRVVLSLPFAEGSSSVEYINNWEQAKALSVELEINFETRGKRGQDAMYEYMAQACAGNRVRRSVGSSLSCINLDWDVIRDKTKTKIESLKEHGPIKNKMSESPNKTVSEEKAKQYLEEFHQTALEHPELSELKTVTGTNPVFAGANYAAWAVNVAQVIDTETADNLEKTTAALSILPGIGSVMGIADGAVHHNTEEIVAQSIALSSLMVAQAIPLVGELVDIGFAAYNFVESIINLFQVVHNSYNRPAYSPGHKT

SEQ ID NO: 138 - protein, 387 aa, Artificial Sequence
  Description of Artificial Sequence: Synthetic polypeptide
MGADDVVDSSKSFVMENFSSYHGTKPGYVDSIQKGIQKPKSGTQGNYDDDWKGFYSTDNKYDAAGYSVDNENPLSGKAGGVVKVTYPGLTKVLALKVDNAETIKKELGLSLTEPLMEQVGTEEFIKRFGDGASRVVLSLPFAEGSSSVEYINNWEQAKALSVELEINFETRGKRGQDAMYEYMAQACAGNRVRRSVGSSLSCINLDWDVIRDKTKTKIESLKEHGPIKNKMSESPNKTVSEEKAKQYLEEFHQTALEHPELSELKTVTGTNPVFAGANYAAWAVNVAQVIDWETADNLEKTTAALSILPGIGSVMGIADGAVHHNTEEIVAQSIALSSLMVAQAIPLVGELVDIGFAAYNFVESIINLFQVVHNSYNRPAYSPGHKT

SEQ ID NO: 139 - protein, 387 aa, Artificial Sequence
  Description of Artificial Sequence: Synthetic polypeptide
MGADDVVDSSKSFVMENFSSYHGTKPGYVDSIQKGIQKPKSGTQGNYDDDWKGFYSTDNKYDAAGYSVDNENPLSGKAGGVVKVTYPGLTKVLALKVDNAETIKKELGLSLTEPLMEQVGTEEFIKRFGDGASRVVLSLPFAEGSSSVEYINNWEQAKALSVELEINFETRGKRGQDAMYEYMAQACAGNRVRRSVGSSLSCINLDWDVIRDKTKTKIESLKEHGPIKNKMSESPNKTVSEEKAKQYLEEFHQTALEHPELSELKTVTGTNPVFAGANYAAWAVNVAQVIDYETADNLEKTTAALSILPGIGSVMGIADGAVHHNTEEIVAQSIALSSLMVAQAIPLVGELVDIGFAAYNFVESIINLFQVVHNSYNRPAYSPGHKT

SEQ ID NO: 140 - protein, 387 aa, Artificial Sequence
  Description of Artificial Sequence: Synthetic polypeptide
MGADDVVDSSKSFVMENFSSYHGTKPGYVDSIQKGIQKPKSGTQGNYDDDWKGFYSTDNKYDAAGYSVDNENPLSGKAGGVVKVTYPGLTKVLALKVDNAETIKKELGLSLTEPLMEQVGTEEFIKRFGDGASRVVLSLPFAEGSSSVEYINNWEQAKALSVELEINFETRGKRGQDAMYEYMAQACAGNRVRRSVGSSLSCINLDWDVIRDKTKTKIESLKEHGPIKNKMSESPNKTVSEEKAKQYLEEFHQTALEHPELSELKTVTGTNPVFAGANYAAWAVNVAQVIDPETADNLEKTTAALSILPGIGSVMGIADGAVHHNTEEIVAQSIALSSLMVAQAIPLVGELVDIGFAAYNFVESIINLFQVVHNSYNRPAYSPGHKT

SEQ ID NO: 141 - protein, 387 aa, Artificial Sequence
  Description of Artificial Sequence: Synthetic polypeptide
MGADDVVDSSKSFVMENFSSYHGTKPGYVDSIQKGIQKPKSGTQGNYDDDWKGFYSTDNKYDAAGYSVDNENPLSGKAGGVVKVTYPGLTKVLALKVDNAETIKKELGLSLTEPLMEQVGTEEFIKRFGDGASRVVLSLPFAEGSSSVEYINNWEQAKALSVELEINFETRGKRGQDAMYEYMAQACAGNRVRRSVGSSLSCINLDWDVIRDKTKTKIESLKEHGPIKNKMSESPNKTVSEEKAKQYLEEFHQTALEHPELSELKTVTGTNPVFAGANYAAWAVNVAQVIDHETADNLEKTTAALSILPGIGSVMGIADGAVHHNTEEIVAQSIALSSLMVAQAIPLVGELVDIGFAAYNFVESIINLFQVVHNSYNRPAYSPGHKT

SEQ ID NO: 142 - protein, 387 aa, Artificial Sequence
  Description of Artificial Sequence: Synthetic polypeptide
MGADDVVDSSKSFVMENFSSYHGTKPGYVDSIQKGIQKPKSGTQGNYDDDWKGFYSTDNKYDAAGYSVDNENPLSGKAGGVVKVTYPGLTKVLALKVDNAETIKKELGLSLTEPLMEQVGTEEFIKRFGDGASRVVLSLPFAEGSSSVEYINNWEQAKALSVELEINFETRGKRGQDAMYEYMAQACAGNRVRRSVGSSLSCINLDWDVIRDKTKTKIESLKEHGPIKNKMSESPNKTVSEEKAKQYLEEFHQTALEHPELSELKTVTGTNPVFAGANYAAWAVNVAQVIDEETADNLEKTTAALSILPGIGSVMGIADGAVHHNTEEIVAQSIALSSLMVAQAIPLVGELVDIGFAAYNFVESIINLFQVVHNSYNRPAYSPGHKT

SEQ ID NO: 143 - protein, 387 aa, Artificial Sequence
  Description of Artificial Sequence: Synthetic polypeptide
MGADDVVDSSKSFVMENFSSYHGTKPGYVDSIQKGIQKPKSGTQGNYDDDWKGFYSTDNKYDAAGYSVDNENPLSGKAGGVVKVTYPGLTKVLALKVDNAETIKKELGLSLTEPLMEQVGTEEFIKRFGDGASRVVLSLPFAEGSSSVEYINNWEQAKALSVELEINFETRGKRGQDAMYEYMAQACAGNRVRRSVGSSLSCINLDWDVIRDKTKTKIESLKEHGPIKNKMSESPNKTVSEEKAKQYLEEFHQTALEHPELSELKTVTGTNPVFAGANYAAWAVNVAQVIDQETADNLEKTTAALSILPGIGSVMGIADGAVHHNTEEIVAQSIALSSLMVAQAIPLVGELVDIGFAAYNFVESIINLFQVVHNSYNRPAYSPGHKT

SEQ ID NO: 144 - protein, 387 aa, Artificial Sequence
  Description of Artificial Sequence: Synthetic polypeptide
MGADDVVDSSKSFVMENFSSYHGTKPGYVDSIQKGIQKPKSGTQGNYDDDWKGFYSTDNKYDAAGYSVDNENPLSGKAGGVVKVTYPGLTKVLALKVDNAETIKKELGLSLTEPLMEQVGTEEFIKRFGDGASRVVLSLPFAEGSSSVEYINNWEQAKALSVELEINFETRGKRGQDAMYEYMAQACAGNRVRRSVGSSLSCINLDWDVIRDKTKTKIESLKEHGPIKNKMSESPNKTVSEEKAKQYLEEFHQTALEHPELSELKTVTGTNPVFAGANYAAWAVNVAQVIDDETADNLEKTTAALSILPGIGSVMGIADGAVHHNTEEIVAQSIALSSLMVAQAIPLVGELVDIGFAAYNFVESIINLFQVVHNSYNRPAYSPGHKT

SEQ ID NO: 145 - protein, 387 aa, Artificial Sequence
  Description of Artificial Sequence: Synthetic polypeptide
MGADDVVDSSKSFVMENFSSYHGTKPGYVDSIQKGIQKPKSGTQGNYDDDWKGFYSTDNKYDAAGYSVDNENPLSGKAGGVVKVTYPGLTKVLALKVDNAETIKKELGLSLTEPLMEQVGTEEFIKRFGDGASRVVLSLPFAEGSSSVEYINNWEQAKALSVELEINFETRGKRGQDAMYEYMAQACAGNRVRRSVGSSLSCINLDWDVIRDKTKTKIESLKEHGPIKNKMSESPNKTVSEEKAKQYLEEFHQTALEHPELSELKTVTGTNPVFAGANYAAWAVNVAQVIDNETADNLEKTTAALSILPGIGSVMGIADGAVHHNTEEIVAQSIALSSLMVAQAIPLVGELVDIGFAAYNFVESIINLFQVVHNSYNRPAYSPGHKT

SEQ ID NO: 146 - protein, 387 aa, Artificial Sequence
  Description of Artificial Sequence: Synthetic polypeptide
MGADDVVDSSKSFVMENFSSYHGTKPGYVDSIQKGIQKPKSGTQGNYDDDWKGFYSTDNKYDAAGYSVDNENPLSGKAGGVVKVTYPGLTKVLALKVDNAETIKKELGLSLTEPLMEQVGTEEFIKRFGDGASRVVLSLPFAEGSSSVEYINNWEQAKALSVELEINFETRGKRGQDAMYEYMAQACAGNRVRRSVGSSLSCINLDWDVIRDKTKTKIESLKEHGPIKNKMSESPNKTVSEEKAKQYLEEFHQTALEHPELSELKTVTGTNPVFAGANYAAWAVNVAQVIDKETADNLEKTTAALSILPGIGSVMGIADGAVHHNTEEIVAQSIALSSLMVAQAIPLVGELVDIGFAAYNFVESIINLFQVVHNSYNRPAYSPGHKT

SEQ ID NO: 147 - protein, 387 aa, Artificial Sequence
  Description of Artificial Sequence: Synthetic polypeptide
MGADDVVDSSKSFVMENFSSYHGTKPGYVDSIQKGIQKPKSGTQGNYDDDWKGFYSTDNKYDAAGYSVDNENPLSGKAGGVVKVTYPGLTKVLALKVDNAETIKKELGLSLTEPLMEQVGTEEFIKRFGDGASRVVLSLPFAEGSSSVEYINNWEQAKALSVELEINFETRGKRGQDAMYEYMAQACAGNRVRRSVGSSLSCINLDWDVIRDKTKTKIESLKEHGPIKNKMSESPNKTVSEEKAKQYLEEFHQTALEHPELSELKTVTGTNPVFAGANYAAWAVNVAQVIDRETADNLEKTTAALSILPGIGSVMGIADGAVHHNTEEIVAQSIALSSLMVAQAIPLVGELVDIGFAAYNFVESIINLFQVVHNSYNRPAYSPGHKT

SEQ ID NO: 148 - protein, 521 aa, Artificial Sequence
  Description of Artificial Sequence: Synthetic polypeptide
MGADDVVDSSKSFVMENFSSYHGTKPGYVDSIQKGIQKPKSGTQGNYDDDWKGFYSTDNKYDAAGYSVDNENPLSGKAGGVVKVTYPGLTKVLALKVDNAETIKKELGLSLTEPLMEQVGTEEFIKRFGDGASRVVLSLPFAEGSSSVEYINNWEQAKALSVELEINFETRGKRGQDAMYEYMAQACAGNRVRRSVGSSLSCINLDWDVIRDKTKTKIESLKEHGPIKNKMSESPNKTVSEEKAKQYLEEFHQTALEHPELSELKTVTGTNPVFAGANYAAWAVNVAQVIDSETADNLEKTTAALSILPGIGSVMGIADGAVHHNTEEIVAQSIALSSLMVAQAIPLVGELVDIGFAAYNFVESIINLFQVVHNSYNRPAYSPGHKTHAPTSSSTKKTQLQLEHLLLDLQMILNGINNYKNPKLTRMLTAKFYMPKKATELKHLQCLEEELKPLEEVLNLAQSKNFHLRPRDLISNINVIVLELKGSETTFMCEYADETATIVEFLNRWITFCQSIISTLT

SEQ ID NO: 149 - protein, 389 aa, Artificial Sequence
  Description of Artificial Sequence: Synthetic polypeptide
MGADDVVDSSKSFVMENFSSYHGTKPGYVDSIQKGIQKPKSGTQGNYDDDWKGFYSTDNKYDAAGYSVDNENPLSGKAGGVVKVTYPGLTKVLALKVDNAETIKKELGLSLTEPLMEQVGTEEFIKRFGDGASRVVLSLPFAEGSSSVEYINNWEQAKALSVELEINFETRGKRGQDAMYEYMAQACAGNRVRRSVGSSLSCINLDWDVIRDKTKTKIESLKEHGPIKNKMSESPNKTVSEEKAKQYLEEFHQTALEHPELSELKTVTGTNPVFAGANYAAWAVNVAQVIDSETADNLEKTTAALSILPGIGSVMGIADGAVHHNTEEIVAQSIALSSLMVAQAIPLVGELVDIGFAAYNFVESIINLFQVVHNSYNRPAYSPGHKTHA

SEQ ID NO: 150 - protein, 387 aa, Artificial Sequence
  Description of Artificial Sequence: Synthetic polypeptide
MGADDVSDSSKSFVMENFSSYHGTKPGYVDSIQKGIQKPKSGTQGNYDDDWKGFYSTDNKYDAAGYSVDNENPLSGKAGGVVKVTYPGLTKVLALKVDNAETIKKELGLSLTEPLMEQVGTEEFIKRFGDGASRVVLSLPFAEGSSSVEYINNWEQAKALSVELEINFETRGKRGQDAMYEYMAQACAGNRVRRSVGSSLSCINLDWDVIRDKTKTKIESLKEHGPIKNKMSESPNKTVSEEKAKQYLEEFHQTALEHPELSELKTVTGTNPVFAGANYAAWAVNVAQVIDSETADNLEKTTAALSILPGIGSVMGIADGAVHHNTEEIVAQSIALSSLMVAQAIPLVGELVDIGFAAYNFVESIINLFQVVHNSYNRPAYSPGHKT

SEQ ID NO: 151 - protein, 387 aa, Artificial Sequence
  Description of Artificial Sequence: Synthetic polypeptide
MGADDVVSSSKSFVMENFSSYHGTKPGYVDSIQKGIQKPKSGTQGNYDDDWKGFYSTDNKYDAAGYSVDNENPLSGKAGGVVKVTYPGLTKVLALKVDNAETIKKELGLSLTEPLMEQVGTEEFIKRFGDGASRVVLSLPFAEGSSSVEYINNWEQAKALSVELEINFETRGKRGQDAMYEYMAQACAGNRVRRSVGSSLSCINLDWDVIRDKTKTKIESLKEHGPIKNKMSESPNKTVSEEKAKQYLEEFHQTALEHPELSELKTVTGTNPVFAGANYAAWAVNVAQVIDSETADNLEKTTAALSILPGIGSVMGIADGAVHHNTEEIVAQSIALSSLMVAQAIPLVGELVDIGFAAYNFVESIINLFQVVHNSYNRPAYSPGHKT

SEQ ID NO: 152 - protein, 387 aa, Artificial Sequence
  Description of Artificial Sequence: Synthetic polypeptide
MGADDVVDSSKSFVMENFSSYHGTKPGYADSIQKGIQKPKSGTQGNYDDDWKGFYSTDNKYDAAGYSVDNENPLSGKAGGVVKVTYPGLTKVLALKVDNAETIKKELGLSLTEPLMEQVGTEEFIKRFGDGASRVVLSLPFAEGSSSVEYINNWEQAKALSVELEINFETRGKRGQDAMYEYMAQACAGNRVRRSVGSSLSCINLDWDVIRDKTKTKIESLKEHGPIKNKMSESPNKTVSEEKAKQYLEEFHQTALEHPELSELKTVTGTNPVFAGANYAAWAVNVAQVIDSETADNLEKTTAALSILPGIGSVMGIADGAVHHNTEEIVAQSIALSSLMVAQAIPLVGELVDIGFAAYNFVESIINLFQVVHNSYNRPAYSPGHKT

SEQ ID NO: 153 - protein, 387 aa, Artificial Sequence
  Description of Artificial Sequence: Synthetic polypeptide
MGADDVVDSSKSFVMENFSSYHGTKPGYSDSIQKGIQKPKSGTQGNYDDDWKGFYSTDNKYDAAGYSVDNENPLSGKAGGVVKVTYPGLTKVLALKVDNAETIKKELGLSLTEPLMEQVGTEEFIKRFGDGASRVVLSLPFAEGSSSVEYINNWEQAKALSVELEINFETRGKRGQDAMYEYMAQACAGNRVRRSVGSSLSCINLDWDVIRDKTKTKIESLKEHGPIKNKMSESPNKTVSEEKAKQYLEEFHQTALEHPELSELKTVTGTNPVFAGANYAAWAVNVAQVIDSETADNLEKTTAALSILPGIGSVMGIADGAVHHNTEEIVAQSIALSSLMVAQAIPLVGELVDIGFAAYNFVESIINLFQVVHNSYNRPAYSPGHKT

SEQ ID NO: 154 - protein, 387 aa, Artificial Sequence
  Description of Artificial Sequence: Synthetic polypeptide
MGADDVVDSSKSFVMENFSSYHGTKPGYVSSIQKGIQKPKSGTQGNYDDDWKGFYSTDNKYDAAGYSVDNENPLSGKAGGVVKVTYPGLTKVLALKVDNAETIKKELGLSLTEPLMEQVGTEEFIKRFGDGASRVVLSLPFAEGSSSVEYINNWEQAKALSVELEINFETRGKRGQDAMYEYMAQACAGNRVRRSVGSSLSCINLDWDVIRDKTKTKIESLKEHGPIKNKMSESPNKTVSEEKAKQYLEEFHQTALEHPELSELKTVTGTNPVFAGANYAAWAVNVAQVIDSETADNLEKTTAALSILPGIGSVMGIADGAVHHNTEEIVAQSIALSSLMVAQAIPLVGELVDIGFAAYNFVESIINLFQVVHNSYNRPAYSPGHKT

SEQ ID NO: 155 - protein, 387 aa, Artificial Sequence
  Description of Artificial Sequence: Synthetic polypeptide
MGADDVVDSSKSFVMENFSSYHGTKPGYVDSIQKGIQKPKSGTQGNYDDDWKGFYSTDNKYDAAGYSVDNENPLSGKAGGVVKVTYPGLTKVLALKVDNAETIKKELGLSLTEPLMEQVGTEEFIKRFGDGASRVVLSLPFAEGSSSVEYINNWEQAKALSVELEINFETRGKRGQDAMYEYMAQACAGNRVRRSVGSSLSCINLDWDVIRDKTKTKIESLKEHGPIKNKMSESPNKTVSEEKAKQYLEEFHQTALEHPELSELKTVTGTNPVFAGANYAAWAVNVAQVADSETADNLEKTTAALSILPGIGSVMGIADGAVHHNTEEIVAQSIALSSLMVAQAIPLVGELVDIGFAAYNFVESIINLFQVVHNSYNRPAYSPGHKT

SEQ ID NO: 156 - protein, 387 aa, Artificial Sequence
  Description of Artificial Sequence: Synthetic polypeptide
MGADDVVDSSKSFVMENFSSYHGTKPGYVDSIQKGIQKPKSGTQGNYDDDWKGFYSTDNKYDAAGYSVDNENPLSGKAGGVVKVTYPGLTKVLALKVDNAETIKKELGLSLTEPLMEQVGTEEFIKRFGDGASRVVLSLPFAEGSSSVEYINNWEQAKALSVELEINFETRGKRGQDAMYEYMAQACAGNRVRRSVGSSLSCINLDWDVIRDKTKTKIESLKEHGPIKNKMSESPNKTVSEEKAKQYLEEFHQTALEHPELSELKTVTGTNPVFAGANYAAWAVNVAQVSDSETADNLEKTTAALSILPGIGSVMGIADGAVHHNTEEIVAQSIALSSLMVAQAIPLVGELVDIGFAAYNFVESIINLFQVVHNSYNRPAYSPGHKT

SEQ ID NO: 157 - protein, 387 aa, Artificial Sequence
  Description of Artificial Sequence: Synthetic polypeptide
MGADDVVDSSKSFVMENFSSYHGTKPGYVDSIQKGIQKPKSGTQGNYDDDWKGFYSTDNKYDAAGYSVDNENPLSGKAGGVVKVTYPGLTKVLALKVDNAETIKKELGLSLTEPLMEQVGTEEFIKRFGDGASRVVLSLPFAEGSSSVEYINNWEQAKALSVELEINFETRGKRGQDAMYEYMAQACAGNRVRRSVGSSLSCINLDWDVIRDKTKTKIESLKEHGPIKNKMSESPNKTVSEEKAKQYLEEFHQTALEHPELSELKTVTGTNPVFAGANYAAWAVNVAQVISSETADNLEKTTAALSILPGIGSVMGIADGAVHHNTEEIVAQSIALSSLMVAQAIPLVGELVDIGFAAYNFVESIINLFQVVHNSYNRPAYSPGHKT

SEQ ID NO: 158 - protein, 6 aa, Artificial Sequence
  Description of Artificial Sequence: Synthetic 6xHis tag
HHHHHH

SEQ ID NO: 159 - protein, 387 aa, Artificial Sequence
  Description of Artificial Sequence: Synthetic polypeptide
MGADDVNDSSKSFVMENFSSYHGTKPGYNDSIQKGIQKPKSGTQGNYDDDWKGFYSTDNKYDAAGYSVDNENPLSGKAGGVVKVTYPGLTKVLALKVDNAETIKKELGLSLTEPLMEQVGTEEFIKRFGDGASRVVLSLPFAEGSSSVEYINNWEQAKALSVELEINFETRGKRGQDAMYEYMAQACAGNRVRRSVGSSLSCINLDWDVIRDKTKTKIESLKEHGPIKNKMSESPNKTVSEEKAKQYLEEFHQTALEHPELSELKTVTGTNPVFAGANYAAWAVNVAQVNDSETADNLEKTTAALSILPGIGSVMGIADGAVHHNTEEIVAQSIALSSLMVAQAIPLVGELVDIGFAAYNFVESIINLFQVVHNSYNRPAYSPGHKT

SEQ ID NO: 160 - protein, 387 aa, Artificial Sequence
  Description of Artificial Sequence: Synthetic polypeptide
MGADDVNDSSKSFVMENFSSYHGTKPGYNDSIQKGIQKPKSGTQGNYDDDWKGFYSTDNKYDAAGYSVDNENPLSGKAGGVVKVTYPGLTKVLALKVDNAETIKKELGLSLTEPLMEQVGTEEFIKRFGDGASRVVLSLPFAEGSSSVEYINNWEQAKALSVELEINFETRGKRGQDAMYEYMAQACAGNRVRRSVGSSLSCINLDWDVIRDKTKTKIESLKEHGPIKNKMSESPNKTVSEEKAKQYLEEFHQTALEHPELSELKTVTGTNPVFAGANYAAWAVNVAQVTDSETADNLEKTTAALSILPGIGSVMGIADGAVHHNTEEIVAQSIALSSLMVAQAIPLVGELVDIGFAAYNFVESIINLFQVVHNSYNRPAYSPGHKT

SEQ ID NO: 161 - protein, 387 aa, Artificial Sequence
  Description of Artificial Sequence: Synthetic polypeptide
MGADDVNDSSKSFVMENFSSYHGTKPGYNDSIQKGIQKPKSGTQGNYDDDWKGFYSTDNKYDAAGYSVDNENPLSGKAGGVVKVTYPGLTKVLALKVDNAETIKKELGLSLTEPLMEQVGTEEFIKRFGDGASRVVLSLPFAEGSSSVEYINNWEQAKALSVELEINFETRGKRGQDAMYEYMAQACAGNRVRRSVGSSLSCINLDWDVIRDKTKTKIESLKEHGPIKNKMSESPNKTVSEEKAKQYLEEFHQTALEHPELSELKTVTGTNPVFAGANYAAWAVNVAQVIDAETADNLEKTTAALSILPGIGSVMGIADGAVHHNTEEIVAQSIALSSLMVAQAIPLVGELVDIGFAAYNFVESIINLFQVVHNSYNRPAYSPGHKT

SEQ ID NO: 162 - protein, 387 aa, Artificial Sequence
  Description of Artificial Sequence: Synthetic polypeptide
MGADDVNDSSKSFVMENFSSYHGTKPGYNDSIQKGIQKPKSGTQGNYDDDWKGFYSTDNKYDAAGYSVDNENPLSGKAGGVVKVTYPGLTKVLALKVDNAETIKKELGLSLTEPLMEQVGTEEFIKRFGDGASRVVLSLPFAEGSSSVEYINNWEQAKALSVELEINFETRGKRGQDAMYEYMAQACAGNRVRRSVGSSLSCINLDWDVIRDKTKTKIESLKEHGPIKNKMSESPNKTVSEEKAKQYLEEFHQTALEHPELSELKTVTGTNPVFAGANYAAWAVNVAQVIDTETADNLEKTTAALSILPGIGSVMGIADGAVHHNTEEIVAQSIALSSLMVAQAIPLVGELVDIGFAAYNFVESIINLFQVVHNSYNRPAYSPGHKT

SEQ ID NO: 163 - protein, 387 aa, Artificial Sequence
  Description of Artificial Sequence: Synthetic polypeptide
MGADDVNDSSKSFVMENFSSYHGTKPGYTDSIQKGIQKPKSGTQGNYDDDWKGFYSTDNKYDAAGYSVDNENPLSGKAGGVVKVTYPGLTKVLALKVDNAETIKKELGLSLTEPLMEQVGTEEFIKRFGDGASRVVLSLPFAEGSSSVEYINNWEQAKALSVELEINFETRGKRGQDAMYEYMAQACAGNRVRRSVGSSLSCINLDWDVIRDKTKTKIESLKEHGPIKNKMSESPNKTVSEEKAKQYLEEFHQTALEHPELSELKTVTGTNPVFAGANYAAWAVNVAQVNDSETADNLEKTTAALSILPGIGSVMGIADGAVHHNTEEIVAQSIALSSLMVAQAIPLVGELVDIGFAAYNFVESIINLFQVVHNSYNRPAYSPGHKT

SEQ ID NO: 164 - protein, 387 aa, Artificial Sequence
  Description of Artificial Sequence: Synthetic polypeptide
MGADDVNDSSKSFVMENFSSYHGTKPGYTDSIQKGIQKPKSGTQGNYDDDWKGFYSTDNKYDAAGYSVDNENPLSGKAGGVVKVTYPGLTKVLALKVDNAETIKKELGLSLTEPLMEQVGTEEFIKRFGDGASRVVLSLPFAEGSSSVEYINNWEQAKALSVELEINFETRGKRGQDAMYEYMAQACAGNRVRRSVGSSLSCINLDWDVIRDKTKTKIESLKEHGPIKNKMSESPNKTVSEEKAKQYLEEFHQTALEHPELSELKTVTGTNPVFAGANYAAWAVNVAQVTDSETADNLEKTTAALSILPGIGSVMGIADGAVHHNTEEIVAQSIALSSLMVAQAIPLVGELVDIGFAAYNFVESIINLFQVVHNSYNRPAYSPGHKT

SEQ ID NO: 165 - protein, 387 aa, Artificial Sequence
  Description of Artificial Sequence: Synthetic polypeptide
MGADDVNDSSKSFVMENFSSYHGTKPGYTDSIQKGIQKPKSGTQGNYDDDWKGFYSTDNKYDAAGYSVDNENPLSGKAGGVVKVTYPGLTKVLALKVDNAETIKKELGLSLTEPLMEQVGTEEFIKRFGDGASRVVLSLPFAEGSSSVEYINNWEQAKALSVELEINFETRGKRGQDAMYEYMAQACAGNRVRRSVGSSLSCINLDWDVIRDKTKTKIESLKEHGPIKNKMSESPNKTVSEEKAKQYLEEFHQTALEHPELSELKTVTGTNPVFAGANYAAWAVNVAQVIDAETADNLEKTTAALSILPGIGSVMGIADGAVHHNTEEIVAQSIALSSLMVAQAIPLVGELVDIGFAAYNFVESIINLFQVVHNSYNRPAYSPGHKT

SEQ ID NO: 166 - protein, 387 aa, Artificial Sequence
  Description of Artificial Sequence: Synthetic polypeptide
MGADDVNDSSKSFVMENFSSYHGTKPGYTDSIQKGIQKPKSGTQGNYDDDWKGFYSTDNKYDAAGYSVDNENPLSGKAGGVVKVTYPGLTKVLALKVDNAETIKKELGLSLTEPLMEQVGTEEFIKRFGDGASRVVLSLPFAEGSSSVEYINNWEQAKALSVELEINFETRGKRGQDAMYEYMAQACAGNRVRRSVGSSLSCINLDWDVIRDKTKTKIESLKEHGPIKNKMSESPNKTVSEEKAKQYLEEFHQTALEHPELSELKTVTGTNPVFAGANYAAWAVNVAQVIDTETADNLEKTTAALSILPGIGSVMGIADGAVHHNTEEIVAQSIALSSLMVAQAIPLVGELVDIGFAAYNFVESIINLFQVVHNSYNRPAYSPGHKT

SEQ ID NO: 167 - protein, 387 aa, Artificial Sequence
  Description of Artificial Sequence: Synthetic polypeptide
MGADDVTDSSKSFVMENFSSYHGTKPGYTDSIQKGIQKPKSGTQGNYDDDWKGFYSTDNKYDAAGYSVDNENPLSGKAGGVVKVTYPGLTKVLALKVDNAETIKKELGLSLTEPLMEQVGTEEFIKRFGDGASRVVLSLPFAEGSSSVEYINNWEQAKALSVELEINFETRGKRGQDAMYEYMAQACAGNRVRRSVGSSLSCINLDWDVIRDKTKTKIESLKEHGPIKNKMSESPNKTVSEEKAKQYLEEFHQTALEHPELSELKTVTGTNPVFAGANYAAWAVNVAQVTDSETADNLEKTTAALSILPGIGSVMGIADGAVHHNTEEIVAQSIALSSLMVAQAIPLVGELVDIGFAAYNFVESIINLFQVVHNSYNRPAYSPGHKT

SEQ ID NO: 168 - protein, 387 aa, Artificial Sequence
  Description of Artificial Sequence: Synthetic polypeptide
MGADDVNDSSKSFVMENFSSYHGTKPGYNDSIQKGIQKPKSGTQGNYDDDWKGFYSTDNKYDAAGYSVDNENPLSGKAGGVVKVTYPGLTKVLALKVDNAETIKKELGLSLTEPLMEQVGTEEFIKRFGDGASRVVLSLPFAEGSSSVEYINNWEQAKALSVELEINFETRGKRGQDAMYEYMAQACAGNRVRRSVGSSLSCINLDWDVIRDKTKTKIESLKEHGPIKNKMSESPNKTVSEEKAKQYLEEFHQTALEHPELSELKTVTGTNPVFAGANYAAWAVNVAQVIDSETADNLEKTTAALSILPGIGSVMGIADGAVHHNTEEIVAQSIALSSLMVAQAIPLVGELVDIGFAAYNFVESIINLFQVVHNSYNRPAYSPGHKT

SEQ ID NO: 169 - protein, 387 aa, Artificial Sequence
  Description of Artificial Sequence: Synthetic polypeptide
MGADDVNDSSKSFVMENFSSYHGTKPGYTDSIQKGIQKPKSGTQGNYDDDWKGFYSTDNKYDAAGYSVDNENPLSGKAGGVVKVTYPGLTKVLALKVDNAETIKKELGLSLTEPLMEQVGTEEFIKRFGDGASRVVLSLPFAEGSSSVEYINNWEQAKALSVELEINFETRGKRGQDAMYEYMAQACAGNRVRRSVGSSLSCINLDWDVIRDKTKTKIESLKEHGPIKNKMSESPNKTVSEEKAKQYLEEFHQTALEHPELSELKTVTGTNPVFAGANYAAWAVNVAQVIDSETADNLEKTTAALSILPGIGSVMGIADGAVHHNTEEIVAQSIALSSLMVAQAIPLVGELVDIGFAAYNFVESIINLFQVVHNSYNRPAYSPGHKT

SEQ ID NO: 170 - protein, 387 aa, Artificial Sequence
  Description of Artificial Sequence: Synthetic polypeptide
MGADDVNDSSKSFVMENFSSYHGTKPGYDDSIQKGIQKPKSGTQGNYDDDWKGFYSTDNKYDAAGYSVDNENPLSGKAGGVVKVTYPGLTKVLALKVDNAETIKKELGLSLTEPLMEQVGTEEFIKRFGDGASRVVLSLPFAEGSSSVEYINNWEQAKALSVELEINFETRGKRGQDAMYEYMAQACAGNRVRRSVGSSLSCINLDWDVIRDKTKTKIESLKEHGPIKNKMSESPNKTVSEEKAKQYLEEFHQTALEHPELSELKTVTGTNPVFAGANYAAWAVNVAQVIDSETADNLEKTTAALSILPGIGSVMGIADGAVHHNTEEIVAQSIALSSLMVAQAIPLVGELVDIGFAAYNFVESIINLFQVVHNSYNRPAYSPGHKT

SEQ ID NO: 171 - protein, 387 aa, Artificial Sequence
  Description of Artificial Sequence: Synthetic polypeptide
MGADDVTDSSKSFVMENFSSYHGTKPGYNDSIQKGIQKPKSGTQGNYDDDWKGFYSTDNKYDAAGYSVDNENPLSGKAGGVVKVTYPGLTKVLALKVDNAETIKKELGLSLTEPLMEQVGTEEFIKRFGDGASRVVLSLPFAEGSSSVEYINNWEQAKALSVELEINFETRGKRGQDAMYEYMAQACAGNRVRRSVGSSLSCINLDWDVIRDKTKTKIESLKEHGPIKNKMSESPNKTVSEEKAKQYLEEFHQTALEHPELSELKTVTGTNPVFAGANYAAWAVNVAQVIDSETADNLEKTTAALSILPGIGSVMGIADGAVHHNTEEIVAQSIALSSLMVAQAIPLVGELVDIGFAAYNFVESIINLFQVVHNSYNRPAYSPGHKT

SEQ ID NO: 172 - protein, 387 aa, Artificial Sequence
  Description of Artificial Sequence: Synthetic polypeptide
MGADDVTDSSKSFVMENFSSYHGTKPGYTDSIQKGIQKPKSGTQGNYDDDWKGFYSTDNKYDAAGYSVDNENPLSGKAGGVVKVTYPGLTKVLALKVDNAETIKKELGLSLTEPLMEQVGTEEFIKRFGDGASRVVLSLPFAEGSSSVEYINNWEQAKALSVELEINFETRGKRGQDAMYEYMAQACAGNRVRRSVGSSLSCINLDWDVIRDKTKTKIESLKEHGPIKNKMSESPNKTVSEEKAKQYLEEFHQTALEHPELSELKTVTGTNPVFAGANYAAWAVNVAQVIDSETADNLEKTTAALSILPGIGSVMGIADGAVHHNTEEIVAQSIALSSLMVAQAIPLVGELVDIGFAAYNFVESIINLFQVVHNSYNRPAYSPGHKT

SEQ ID NO: 173 - protein, 387 aa, Artificial Sequence; identical to SEQ ID NO: 7
  Description of Artificial Sequence: Synthetic polypeptide

SEQ ID NO: 174 - protein, 387 aa, Artificial Sequence
  Description of Artificial Sequence: Synthetic polypeptide
MGADDVGDSSKSFVMENFSSYHGTKPGYVDSIQKGIQKPKSGTQGNYDDDWKGFYSTDNKYDAAGYSVDNENPLSGKAGGVVKVTYPGLTKVLALKVDNAETIKKELGLSLTEPLMEQVGTEEFIKRFGDGASRVVLSLPFAEGSSSVEYINNWEQAKALSVELEINFETRGKRGQDAMYEYMAQACAGNRVRRSVGSSLSCINLDWDVIRDKTKTKIESLKEHGPIKNKMSESPNKTVSEEKAKQYLEEFHQTALEHPELSELKTVTGTNPVFAGANYAAWAVNVAQVIDSETADNLEKTTAALSILPGIGSVMGIADGAVHHNTEEIVAQSIALSSLMVAQAIPLVGELVDIGFAAYNFVESIINLFQVVHNSYNRPAYSPGHKT

SEQ ID NO: 175 - protein, 387 aa, Artificial Sequence
  Description of Artificial Sequence: Synthetic polypeptide
MGADDVVDSSKSFVMENFSSYHGTKPGYGDSIQKGIQKPKSGTQGNYDDDWKGFYSTDNKYDAAGYSVDNENPLSGKAGGVVKVTYPGLTKVLALKVDNAETIKKELGLSLTEPLMEQVGTEEFIKRFGDGASRVVLSLPFAEGSSSVEYINNWEQAKALSVELEINFETRGKRGQDAMYEYMAQACAGNRVRRSVGSSLSCINLDWDVIRDKTKTKIESLKEHGPIKNKMSESPNKTVSEEKAKQYLEEFHQTALEHPELSELKTVTGTNPVFAGANYAAWAVNVAQVIDSETADNLEKTTAALSILPGIGSVMGIADGAVHHNTEEIVAQSIALSSLMVAQAIPLVGELVDIGFAAYNFVESIINLFQVVHNSYNRPAYSPGHKT

SEQ ID NO: 176 - protein, 387 aa, Artificial Sequence
  Description of Artificial Sequence: Synthetic polypeptide
MGADDVVDSSKSFVMENFSSYHGTKPGYVDSIQKGIQKPKSGTQGNYDDDWKGFYSTDNKYDAAGYSVDNENPLSGKAGGVVKVTYPGLTKVLALKVDNAETIKKELGLSLTEPLMEQVGTEEFIKRFGDGASRVVLSLPFAEGSSSVEYINNWEQAKALSVELEINFETRGKRGQDAMYEYMAQACAGNRVRRSVGSSLSCINLDWDVIRDKTKTKIESLKEHGPIKNKMSESPNKTVSEEKAKQYLEEFHQTALEHPELSELKTVTGTNPVFAGANYAAWAVNVAQVGDSETADNLEKTTAALSILPGIGSVMGIADGAVHHNTEEIVAQSIALSSLMVAQAIPLVGELVDIGFAAYNFVESIINLFQVVHNSYNRPAYSPGHKT

SEQ ID NO: 177 - protein, 387 aa, Artificial Sequence
  Description of Artificial Sequence: Synthetic polypeptide
MGADDVLDSSKSFVMENFSSYHGTKPGYVDSIQKGIQKPKSGTQGNYDDDWKGFYSTDNKYDAAGYSVDNENPLSGKAGGVVKVTYPGLTKVLALKVDNAETIKKELGLSLTEPLMEQVGTEEFIKRFGDGASRVVLSLPFAEGSSSVEYINNWEQAKALSVELEINFETRGKRGQDAMYEYMAQACAGNRVRRSVGSSLSCINLDWDVIRDKTKTKIESLKEHGPIKNKMSESPNKTVSEEKAKQYLEEFHQTALEHPELSELKTVTGTNPVFAGANYAAWAVNVAQVIDSETADNLEKTTAALSILPGIGSVMGIADGAVHHNTEEIVAQSIALSSLMVAQAIPLVGELVDIGFAAYNFVESIINLFQVVHNSYNRPAYSPGHKT

SEQ ID NO: 178 - protein, 387 aa, Artificial Sequence
  Description of Artificial Sequence: Synthetic polypeptide
MGADDVVDSSKSFVMENFSSYHGTKPGYLDSIQKGIQKPKSGTQGNYDDDWKGFYSTDNKYDAAGYSVDNENPLSGKAGGVVKVTYPGLTKVLALKVDNAETIKKELGLSLTEPLMEQVGTEEFIKRFGDGASRVVLSLPFAEGSSSVEYINNWEQAKALSVELEINFETRGKRGQDAMYEYMAQACAGNRVRRSVGSSLSCINLDWDVIRDKTKTKIESLKEHGPIKNKMSESPNKTVSEEKAKQYLEEFHQTALEHPELSELKTVTGTNPVFAGANYAAWAVNVAQVIDSETADNLEKTTAALSILPGIGSVMGIADGAVHHNTEEIVAQSIALSSLMVAQAIPLVGELVDIGFAAYNFVESIINLFQVVHNSYNRPAYSPGHKT

SEQ ID NO: 179 - protein, 387 aa, Artificial Sequence
  Description of Artificial Sequence: Synthetic polypeptide
MGADDVVDSSKSFVMENFSSYHGTKPGYVDSIQKGIQKPKSGTQGNYDDDWKGFYSTDNKYDAAGYSVDNENPLSGKAGGVVKVTYPGLTKVLALKVDNAETIKKELGLSLTEPLMEQVGTEEFIKRFGDGASRVVLSLPFAEGSSSVEYINNWEQAKALSVELEINFETRGKRGQDAMYEYMAQACAGNRVRRSVGSSLSCINLDWDVIRDKTKTKIESLKEHGPIKNKMSESPNKTVSEEKAKQYLEEFHQTALEHPELSELKTVTGTNPVFAGANYAAWAVNVAQVLDSETADNLEKTTAALSILPGIGSVMGIADGAVHHNTEEIVAQSIALSSLMVAQAIPLVGELVDIGFAAYNFVESIINLFQVVHNSYNRPAYSPGHKT

SEQ ID NO: 180 - protein, 387 aa, Artificial Sequence
  Description of Artificial Sequence: Synthetic polypeptide
MGADDVVDLSKSFVMENFSSYHGTKPGYVDSIQKGIQKPKSGTQGNYDDDWKGFYSTDNKYDAAGYSVDNENPLSGKAGGVVKVTYPGLTKVLALKVDNAETIKKELGLSLTEPLMEQVGTEEFIKRFGDGASRVVLSLPFAEGSSSVEYINNWEQAKALSVELEINFETRGKRGQDAMYEYMAQACAGNRVRRSVGSSLSCINLDWDVIRDKTKTKIESLKEHGPIKNKMSESPNKTVSEEKAKQYLEEFHQTALEHPELSELKTVTGTNPVFAGANYAAWAVNVAQVIDSETADNLEKTTAALSILPGIGSVMGIADGAVHHNTEEIVAQSIALSSLMVAQAIPLVGELVDIGFAAYNFVESIINLFQVVHNSYNRPAYSPGHKT

SEQ ID NO: 181 - protein, 387 aa, Artificial Sequence
  Description of Artificial Sequence: Synthetic polypeptide
MGADDVVDSSKSFVMENFSSYHGTKPGYVDLIQKGIQKPKSGTQGNYDDDWKGFYSTDNKYDAAGYSVDNENPLSGKAGGVVKVTYPGLTKVLALKVDNAETIKKELGLSLTEPLMEQVGTEEFIKRFGDGASRVVLSLPFAEGSSSVEYINNWEQAKALSVELEINFETRGKRGQDAMYEYMAQACAGNRVRRSVGSSLSCINLDWDVIRDKTKTKIESLKEHGPIKNKMSESPNKTVSEEKAKQYLEEFHQTALEHPELSELKTVTGTNPVFAGANYAAWAVNVAQVIDSETADNLEKTTAALSILPGIGSVMGIADGAVHHNTEEIVAQSIALSSLMVAQAIPLVGELVDIGFAAYNFVESIINLFQVVHNSYNRPAYSPGHKT

SEQ ID NO: 182 - protein, 387 aa, Artificial Sequence
  Description of Artificial Sequence: Synthetic polypeptide
MGADDVVDSSKSFVMENFSSYHGTKPGYVDSIQKGIQKPKSGTQGNYDDDWKGFYSTDNKYDAAGYSVDNENPLSGKAGGVVKVTYPGLTKVLALKVDNAETIKKELGLSLTEPLMEQVGTEEFIKRFGDGASRVVLSLPFAEGSSSVEYINNWEQAKALSVELEINFETRGKRGQDAMYEYMAQACAGNRVRRSVGSSLSCINLDWDVIRDKTKTKIESLKEHGPIKNKMSESPNKTVSEEKAKQYLEEFHQTALEHPELSELKTVTGTNPVFAGANYAAWAVNVAQVIDLETADNLEKTTAALSILPGIGSVMGIADGAVHHNTEEIVAQSIALSSLMVAQAIPLVGELVDIGFAAYNFVESIINLFQVVHNSYNRPAYSPGHKT

SEQ ID NO: 183 - protein, 387 aa, Artificial Sequence
  Description of Artificial Sequence: Synthetic polypeptide
MGADDVVDVSKSFVMENFSSYHGTKPGYVDSIQKGIQKPKSGTQGNYDDDWKGFYSTDNKYDAAGYSVDNENPLSGKAGGVVKVTYPGLTKVLALKVDNAETIKKELGLSLTEPLMEQVGTEEFIKRFGDGASRVVLSLPFAEGSSSVEYINNWEQAKALSVELEINFETRGKRGQDAMYEYMAQACAGNRVRRSVGSSLSCINLDWDVIRDKTKTKIESLKEHGPIKNKMSESPNKTVSEEKAKQYLEEFHQTALEHPELSELKTVTGTNPVFAGANYAAWAVNVAQVIDSETADNLEKTTAALSILPGIGSVMGIADGAVHHNTEEIVAQSIALSSLMVAQAIPLVGELVDIGFAAYNFVESIINLFQVVHNSYNRPAYSPGHKT

SEQ ID NO: 184 - protein, 387 aa, Artificial Sequence
  Description of Artificial Sequence: Synthetic polypeptide
MGADDVVDSSKSFVMENFSSYHGTKPGYVDVIQKGIQKPKSGTQGNYDDDWKGFYSTDNKYDAAGYSVDNENPLSGKAGGVVKVTYPGLTKVLALKVDNAETIKKELGLSLTEPLMEQVGTEEFIKRFGDGASRVVLSLPFAEGSSSVEYINNWEQAKALSVELEINFETRGKRGQDAMYEYMAQACAGNRVRRSVGSSLSCINLDWDVIRDKTKTKIESLKEHGPIKNKMSESPNKTVSEEKAKQYLEEFHQTALEHPELSELKTVTGTNPVFAGANYAAWAVNVAQVIDSETADNLEKTTAALSILPGIGSVMGIADGAVHHNTEEIVAQSIALSSLMVAQAIPLVGELVDIGFAAYNFVESIINLFQVVHNSYNRPAYSPGHKT

SEQ ID NO: 185 - protein, 387 aa, Artificial Sequence
  Description of Artificial Sequence: Synthetic polypeptide
MGADDVVDSSKSFVMENFSSYHGTKPGYVDSIQKGIQKPKSGTQGNYDDDWKGFYSTDNKYDAAGYSVDNENPLSGKAGGVVKVTYPGLTKVLALKVDNAETIKKELGLSLTEPLMEQVGTEEFIKRFGDGASRVVLSLPFAEGSSSVEYINNWEQAKALSVELEINFETRGKRGQDAMYEYMAQACAGNRVRRSVGSSLSCINLDWDVIRDKTKTKIESLKEHGPIKNKMSESPNKTVSEEKAKQYLEEFHQTALEHPELSELKTVTGTNPVFAGANYAAWAVNVAQVIDVETADNLEKTTAALSILPGIGSVMGIADGAVHHNTEEIVAQSIALSSLMVAQAIPLVGELVDIGFAAYNFVESIINLFQVVHNSYNRPAYSPGHKT

SEQ ID NO: 186 - protein, 387 aa, Artificial Sequence
  Description of Artificial Sequence: Synthetic polypeptide
MGADDVVESSKSFVMENFSSYHGTKPGYVDSIQKGIQKPKSGTQGNYDDDWKGFYSTDNKYDAAGYSVDNENPLSGKAGGVVKVTYPGLTKVLALKVDNAETIKKELGLSLTEPLMEQVGTEEFIKRFGDGASRVVLSLPFAEGSSSVEYINNWEQAKALSVELEINFETRGKRGQDAMYEYMAQACAGNRVRRSVGSSLSCINLDWDVIRDKTKTKIESLKEHGPIKNKMSESPNKTVSEEKAKQYLEEFHQTALEHPELSELKTVTGTNPVFAGANYAAWAVNVAQVIDSETADNLEKTTAALSILPGIGSVMGIADGAVHHNTEEIVAQSIALSSLMVAQAIPLVGELVDIGFAAYNFVESIINLFQVVHNSYNRPAYSPGHKT

SEQ ID NO: 187 - protein, 387 aa, Artificial Sequence
  Description of Artificial Sequence: Synthetic polypeptide
MGADDVVDSSKSFVMENFSSYHGTKPGYVESIQKGIQKPKSGTQGNYDDDWKGFYSTDNKYDAAGYSVDNENPLSGKAGGVVKVTYPGLTKVLALKVDNAETIKKELGLSLTEPLMEQVGTEEFIKRFGDGASRVVLSLPFAEGSSSVEYINNWEQAKALSVELEINFETRGKRGQDAMYEYMAQACAGNRVRRSVGSSLSCINLDWDVIRDKTKTKIESLKEHGPIKNKMSESPNKTVSEEKAKQYLEEFHQTALEHPELSELKTVTGTNPVFAGANYAAWAVNVAQVIDSETADNLEKTTAALSILPGIGSVMGIADGAVHHNTEEIVAQSIALSSLMVAQAIPLVGELVDIGFAAYNFVESIINLFQVVHNSYNRPAYSPGHKT

SEQ ID NO: 188 - protein, 387 aa, Artificial Sequence
  Description of Artificial Sequence: Synthetic polypeptide
MGADDVVDSSKSFVMENFSSYHGTKPGYVDSIQKGIQKPKSGTQGNYDDDWKGFYSTDNKYDAAGYSVDNENPLSGKAGGVVKVTYPGLTKVLALKVDNAETIKKELGLSLTEPLMEQVGTEEFIKRFGDGASRVVLSLPFAEGSSSVEYINNWEQAKALSVELEINFETRGKRGQDAMYEYMAQACAGNRVRRSVGSSLSCINLDWDVIRDKTKTKIESLKEHGPIKNKMSESPNKTVSEEKAKQYLEEFHQTALEHPELSELKTVTGTNPVFAGANYAAWAVNVAQVIESETADNLEKTTAALSILPGIGSVMGIADGAVHHNTEEIVAQSIALSSLMVAQAIPLVGELVDIGFAAYNFVESIINLFQVVHNSYNRPAYSPGHKT

SEQ ID NO: 189 - protein, 402 aa, Artificial Sequence
  Description of Artificial Sequence: Synthetic construct
MGADDVVDSSKSFVMENFSSYHGTKPGYVDSIQKGIQKPKSGTQGNYDDDWKGFYSTDNKYDAAGYSVDNENPLSGKAGGVVKVTYPGLTKVLALKVDNAETIKKELGLSLTEPLMEQVGTEEFIKRFGDGASRVVLSLPFAEGSSSVEYINNWEQAKALSVELEINFETRGKRGQDAMYEYMAQACAGNRVRRSVGSSLSCINLDWDVIRDKTKTKIESLKEHGPIKNKMSESPNKTVSEEKAKQYLEEFHQTALEHPELSELKTVTGTNPVFAGANYAAWAVNVAQVIDSETADNLEKTTAALSILPGIGSVMGIADGAVHHNTEEIVAQSIALSSLMVAQAIPLVGELVDIGFAAYNFVESIINLFQVVHNSYNRPAYSELADYKDDDDKGLEHHHHHH

SEQ ID NO: 190 - protein, 382 aa, Artificial Sequence
  Description of Artificial Sequence: Synthetic construct
MGADDVSDSSKSFVMENFSSYHGTKPGYVDSIQKGIQKPKSGTQGNYDDDWKGFYSTDNKYDAAGYSVDNENPLSGKAGGVVKVTYPGLTKVLALKVDNAETIKKELGLSLTEPLMEQVGTEEFIKRFGDGASRVVLSLPFAEGSSSVEYINNWEQAKALSVELEINFETRGKRGQDAMYEYMAQACAGNRVRRSVGSSLSCINLDWDVIRDKTKTKIESLKEHGPIKNKMSESPNKTVSEEKAKQYLEEFHQTALEHPELSELKTVTGTNPVFAGANYAAWAVNVAQVIDSETADNLEKTTAALSILPGIGSVMGIADGAVHHNTEEIVAQSIALSSLMVAQAIPLVGELVDIGFAAYNFVESIINLFQVVHNSYNRPAYS

SEQ ID NO: 191 - protein, 382 aa, Artificial Sequence
  Description of Artificial Sequence: Synthetic construct
MGADDVTDSSKSFVMENFSSYHGTKPGYVDSIQKGIQKPKSGTQGNYDDDWKGFYSTDNKYDAAGYSVDNENPLSGKAGGVVKVTYPGLTKVLALKVDNAETIKKELGLSLTEPLMEQVGTEEFIKRFGDGASRVVLSLPFAEGSSSVEYINNWEQAKALSVELEINFETRGKRGQDAMYEYMAQACAGNRVRRSVGSSLSCINLDWDVIRDKTKTKIESLKEHGPIKNKMSESPNKTVSEEKAKQYLEEFHQTALEHPELSELKTVTGTNPVFAGANYAAWAVNVAQVIDSETADNLEKTTAALSILPGIGSVMGIADGAVHHNTEEIVAQSIALSSLMVAQAIPLVGELVDIGFAAYNFVESIINLFQVVHNSYNRPAYS

SEQ ID NO: 192 - protein, 382 aa, Artificial Sequence
  Description of Artificial Sequence: Synthetic construct
MGADDVNDSSKSFVMENFSSYHGTKPGYVDSIQKGIQKPKSGTQGNYDDDWKGFYSTDNKYDAAGYSVDNENPLSGKAGGVVKVTYPGLTKVLALKVDNAETIKKELGLSLTEPLMEQVGTEEFIKRFGDGASRVVLSLPFAEGSSSVEYINNWEQAKALSVELEINFETRGKRGQDAMYEYMAQACAGNRVRRSVGSSLSCINLDWDVIRDKTKTKIESLKEHGPIKNKMSESPNKTVSEEKAKQYLEEFHQTALEHPELSELKTVTGTNPVFAGANYAAWAVNVAQVIDSETADNLEKTTAALSILPGIGSVMGIADGAVHHNTEEIVAQSIALSSLMVAQAIPLVGELVDIGFAAYNFVESIINLFQVVHNSYNRPAYS

SEQ ID NO: 193 - protein, 382 aa, Artificial Sequence
  Description of Artificial Sequence: Synthetic construct
MGADDVDDSSKSFVMENFSSYHGTKPGYVDSIQKGIQKPKSGTQGNYDDDWKGFYSTDNKYDAAGYSVDNENPLSGKAGGVVKVTYPGLTKVLALKVDNAETIKKELGLSLTEPLMEQVGTEEFIKRFGDGASRVVLSLPFAEGSSSVEYINNWEQAKALSVELEINFETRGKRGQDAMYEYMAQACAGNRVRRSVGSSLSCINLDWDVIRDKTKTKIESLKEHGPIKNKMSESPNKTVSEEKAKQYLEEFHQTALEHPELSELKTVTGTNPVFAGANYAAWAVNVAQVIDSETADNLEKTTAALSILPGIGSVMGIADGAVHHNTEEIVAQSIALSSLMVAQAIPLVGELVDIGFAAYNFVESIINLFQVVHNSYNRPAYS

SEQ ID NO: 194 - protein, 382 aa, Artificial Sequence
  Description of Artificial Sequence: Synthetic construct
MGADDVVESSKSFVMENFSSYHGTKPGYVDSIQKGIQKPKSGTQGNYDDDWKGFYSTDNKYDAAGYSVDNENPLSGKAGGVVKVTYPGLTKVLALKVDNAETIKKELGLSLTEPLMEQVGTEEFIKRFGDGASRVVLSLPFAEGSSSVEYINNWEQAKALSVELEINFETRGKRGQDAMYEYMAQACAGNRVRRSVGSSLSCINLDWDVIRDKTKTKIESLKEHGPIKNKMSESPNKTVSEEKAKQYLEEFHQTALEHPELSELKTVTGTNPVFAGANYAAWAVNVAQVIDSETADNLEKTTAALSILPGIGSVMGIADGAVHHNTEEIVAQSIALSSLMVAQAIPLVGELVDIGFAAYNFVESIINLFQVVHNSYNRPAYS

SEQ ID NO: 195 - protein, 382 aa, Artificial Sequence
  Description of Artificial Sequence: Synthetic construct
MGADDVVNSSKSFVMENFSSYHGTKPGYVDSIQKGIQKPKSGTQGNYDDDWKGFYSTDNKYDAAGYSVDNENPLSGKAGGVVKVTYPGLTKVLALKVDNAETIKKELGLSLTEPLMEQVGTEEFIKRFGDGASRVVLSLPFAEGSSSVEYINNWEQAKALSVELEINFETRGKRGQDAMYEYMAQACAGNRVRRSVGSSLSCINLDWDVIRDKTKTKIESLKEHGPIKNKMSESPNKTVSEEKAKQYLEEFHQTALEHPELSELKTVTGTNPVFAGANYAAWAVNVAQVIDSETADNLEKTTAALSILPGIGSVMGIADGAVHHNTEEIVAQSIALSSLMVAQAIPLVGELVDIGFAAYNFVESIINLFQVVHNSYNRPAYS

SEQ ID NO: 196 - protein, 382 aa, Artificial Sequence
  Description of Artificial Sequence: Synthetic construct
MGADDVVDASKSFVMENFSSYHGTKPGYVDSIQKGIQKPKSGTQGNYDDDWKGFYSTDNKYDAAGYSVDNENPLSGKAGGVVKVTYPGLTKVLALKVDNAETIKKELGLSLTEPLMEQVGTEEFIKRFGDGASRVVLSLPFAEGSSSVEYINNWEQAKALSVELEINFETRGKRGQDAMYEYMAQACAGNRVRRSVGSSLSCINLDWDVIRDKTKTKIESLKEHGPIKNKMSESPNKTVSEEKAKQYLEEFHQTALEHPELSELKTVTGTNPVFAGANYAAWAVNVAQVIDSETADNLEKTTAALSILPGIGSVMGIADGAVHHNTEEIVAQSIALSSLMVAQAIPLVGELVDIGFAAYNFVESIINLFQVVHNSYNRPAYS

SEQ ID NO: 197 - protein, 382 aa, Artificial Sequence
  Description of Artificial Sequence: Synthetic construct
MGADDVVDGSKSFVMENFSSYHGTKPGYVDSIQKGIQKPKSGTQGNYDDDWKGFYSTDNKYDAAGYSVDNENPLSGKAGGVVKVTYPGLTKVLALKVDNAETIKKELGLSLTEPLMEQVGTEEFIKRFGDGASRVVLSLPFAEGSSSVEYINNWEQAKALSVELEINFETRGKRGQDAMYEYMAQACAGNRVRRSVGSSLSCINLDWDVIRDKTKTKIESLKEHGPIKNKMSESPNKTVSEEKAKQYLEEFHQTALEHPELSELKTVTGTNPVFAGANYAAWAVNVAQVIDSETADNLEKTTAALSILPGIGSVMGIADGAVHHNTEEIVAQSIALSSLMVAQAIPLVGELVDIGFAAYNFVESIINLFQVVHNSYNRPAYS

SEQ ID NO: 198 - protein, 382 aa, Artificial Sequence
  Description of Artificial Sequence: Synthetic construct
MGADDVVDTSKSFVMENFSSYHGTKPGYVDSIQKGIQKPKSGTQGNYDDDWKGFYSTDNKYDAAGYSVDNENPLSGKAGGVVKVTYPGLTKVLALKVDNAETIKKELGLSLTEPLMEQVGTEEFIKRFGDGASRVVLSLPFAEGSSSVEYINNWEQAKALSVELEINFETRGKRGQDAMYEYMAQACAGNRVRRSVGSSLSCINLDWDVIRDKTKTKIESLKEHGPIKNKMSESPNKTVSEEKAKQYLEEFHQTALEHPELSELKTVTGTNPVFAGANYAAWAVNVAQVIDSETADNLEKTTAALSILPGIGSVMGIADGAVHHNTEEIVAQSIALSSLMVAQAIPLVGELVDIGFAAYNFVESIINLFQVVHNSYNRPAYS

SEQ ID NO: 199 - protein, 382 aa, Artificial Sequence
  Description of Artificial Sequence: Synthetic construct
MGADDVVDSSKSFVMENFSSYHGTKPGYSDSIQKGIQKPKSGTQGNYDDDWKGFYSTDNKYDAAGYSVDNENPLSGKAGGVVKVTYPGLTKVLALKVDNAETIKKELGLSLTEPLMEQVGTEEFIKRFGDGASRVVLSLPFAEGSSSVEYINNWEQAKALSVELEINFETRGKRGQDAMYEYMAQACAGNRVRRSVGSSLSCINLDWDVIRDKTKTKIESLKEHGPIKNKMSESPNKTVSEEKAKQYLEEFHQTALEHPELSELKTVTGTNPVFAGANYAAWAVNVAQVIDSETADNLEKTTAALSILPGIGSVMGIADGAVHHNTEEIVAQSIALSSLMVAQAIPLVGELVDIGFAAYNFVESIINLFQVVHNSYNRPAYS

SEQ ID NO: 200 - protein, 382 aa, Artificial Sequence
  Description of Artificial Sequence: Synthetic construct
MGADDVVDSSKSFVMENFSSYHGTKPGYTDSIQKGIQKPKSGTQGNYDDDWKGFYSTDNKYDAAGYSVDNENPLSGKAGGVVKVTYPGLTKVLALKVDNAETIKKELGLSLTEPLMEQVGTEEFIKRFGDGASRVVLSLPFAEGSSSVEYINNWEQAKALSVELEINFETRGKRGQDAMYEYMAQACAGNRVRRSVGSSLSCINLDWDVIRDKTKTKIESLKEHGPIKNKMSESPNKTVSEEKAKQYLEEFHQTALEHPELSELKTVTGTNPVFAGANYAAWAVNVAQVIDSETADNLEKTTAALSILPGIGSVMGIADGAVHHNTEEIVAQSIALSSLMVAQAIPLVGELVDIGFAAYNFVESIINLFQVVHNSYNRPAYS

SEQ ID NO: 201 - protein, 382 aa, Artificial Sequence
  Description of Artificial Sequence: Synthetic construct
MGADDVVDSSKSFVMENFSSYHGTKPGYNDSIQKGIQKPKSGTQGNYDDDWKGFYSTDNKYDAAGYSVDNENPLSGKAGGVVKVTYPGLTKVLALKVDNAETIKKELGLSLTEPLMEQVGTEEFIKRFGDGASRVVLSLPFAEGSSSVEYINNWEQAKALSVELEINFETRGKRGQDAMYEYMAQACAGNRVRRSVGSSLSCINLDWDVIRDKTKTKIESLKEHGPIKNKMSESPNKTVSEEKAKQYLEEFHQTALEHPELSELKTVTGTNPVFAGANYAAWAVNVAQVIDSETADNLEKTTAALSILPGIGSVMGIADGAVHHNTEEIVAQSIALSSLMVAQAIPLVGELVDIGFAAYNFVESIINLFQVVHNSYNRPAYS

SEQ ID NO: 202 - protein, 382 aa, Artificial Sequence
  Description of Artificial Sequence: Synthetic construct
MGADDVVDSSKSFVMENFSSYHGTKPGYDDSIQKGIQKPKSGTQGNYDDDWKGFYSTDNKYDAAGYSVDNENPLSGKAGGVVKVTYPGLTKVLALKVDNAETIKKELGLSLTEPLMEQVGTEEFIKRFGDGASRVVLSLPFAEGSSSVEYINNWEQAKALSVELEINFETRGKRGQDAMYEYMAQACAGNRVRRSVGSSLSCINLDWDVIRDKTKTKIESLKEHGPIKNKMSESPNKTVSEEKAKQYLEEFHQTALEHPELSELKTVTGTNPVFAGANYAAWAVNVAQVIDSETADNLEKTTAALSILPGIGSVMGIADGAVHHNTEEIVAQSIALSSLMVAQAIPLVGELVDIGFAAYNFVESIINLFQVVHNSYNRPAYS

SEQ ID NO: 203 - protein, 382 aa, Artificial Sequence
  Description of Artificial Sequence: Synthetic construct
MGADDVVDSSKSFVMENFSSYHGTKPGYVESIQKGIQKPKSGTQGNYDDDWKGFYSTDNKYDAAGYSVDNENPLSGKAGGVVKVTYPGLTKVLALKVDNAETIKKELGLSLTEPLMEQVGTEEFIKRFGDGASRVVLSLPFAEGSSSVEYINNWEQAKALSVELEINFETRGKRGQDAMYEYMAQACAGNRVRRSVGSSLSCINLDWDVIRDKTKTKIESLKEHGPIKNKMSESPNKTVSEEKAKQYLEEFHQTALEHPELSELKTVTGTNPVFAGANYAAWAVNVAQVIDSETADNLEKTTAALSILPGIGSVMGIADGAVHHNTEEIVAQSIALSSLMVAQAIPLVGELVDIGFAAYNFVESIINLFQVVHNSYNRPAYS

SEQ ID NO: 204 - protein, 382 aa, Artificial Sequence
  Description of Artificial Sequence: Synthetic construct
MGADDVVDSSKSFVMENFSSYHGTKPGYVNSIQKGIQKPKSGTQGNYDDDWKGFYSTDNKYDAAGYSVDNENPLSGKAGGVVKVTYPGLTKVLALKVDNAETIKKELGLSLTEPLMEQVGTEEFIKRFGDGASRVVLSLPFAEGSSSVEYINNWEQAKALSVELEINFETRGKRGQDAMYEYMAQACAGNRVRRSVGSSLSCINLDWDVIRDKTKTKIESLKEHGPIKNKMSESPNKTVSEEKAKQYLEEFHQTALEHPELSELKTVTGTNPVFAGANYAAWAVNVAQVIDSETADNLEKTTAALSILPGIGSVMGIADGAVHHNTEEIVAQSIALSSLMVAQAIPLVGELVDIGFAAYNFVESIINLFQVVHNSYNRPAYS

SEQ ID NO: 205 - protein, 382 aa, Artificial Sequence
  Description of Artificial Sequence: Synthetic construct
MGADDVVDSSKSFVMENFSSYHGTKPGYVDTIQKGIQKPKSGTQGNYDDDWKGFYSTDNKYDAAGYSVDNENPLSGKAGGVVKVTYPGLTKVLALKVDNAETIKKELGLSLTEPLMEQVGTEEFIKRFGDGASRVVLSLPFAEGSSSVEYINNWEQAKALSVELEINFETRGKRGQDAMYEYMAQACAGNRVRRSVGSSLSCINLDWDVIRDKTKTKIESLKEHGPIKNKMSESPNKTVSEEKAKQYLEEFHQTALEHPELSELKTVTGTNPVFAGANYAAWAVNVAQVIDSETADNLEKTTAALSILPGIGSVMGIADGAVHHNTEEIVAQSIALSSLMVAQAIPLVGELVDIGFAAYNFVESIINLFQVVHNSYNRPAYS

SEQ ID NO: 206 - protein, 382 aa, Artificial Sequence
  Description of Artificial Sequence: Synthetic construct
MGADDVVDSSKSFVMENFSSYHGTKPGYVDGIQKGIQKPKSGTQGNYDDDWKGFYSTDNKYDAAGYSVDNENPLSGKAGGVVKVTYPGLTKVLALKVDNAETIKKELGLSLTEPLMEQVGTEEFIKRFGDGASRVVLSLPFAEGSSSVEYINNWEQAKALSVELEINFETRGKRGQDAMYEYMAQACAGNRVRRSVGSSLSCINLDWDVIRDKTKTKIESLKEHGPIKNKMSESPNKTVSEEKAKQYLEEFHQTALEHPELSELKTVTGTNPVFAGANYAAWAVNVAQVIDSETADNLEKTTAALSILPGIGSVMGIADGAVHHNTEEIVAQSIALSSLMVAQAIPLVGELVDIGFAAYNFVESIINLFQVVHNSYNRPAYS

SEQ ID NO: 207 - protein, 382 aa, Artificial Sequence
  Description of Artificial Sequence: Synthetic construct
MGADDVVDSSKSFVMENFSSYHGTKPGYVDNIQKGIQKPKSGTQGNYDDDWKGFYSTDNKYDAAGYSVDNENPLSGKAGGVVKVTYPGLTKVLALKVDNAETIKKELGLSLTEPLMEQVGTEEFIKRFGDGASRVVLSLPFAEGSSSVEYINNWEQAKALSVELEINFETRGKRGQDAMYEYMAQACAGNRVRRSVGSSLSCINLDWDVIRDKTKTKIESLKEHGPIKNKMSESPNKTVSEEKAKQYLEEFHQTALEHPELSELKTVTGTNPVFAGANYAAWAVNVAQVIDSETADNLEKTTAALSILPGIGSVMGIADGAVHHNTEEIVAQSIALSSLMVAQAIPLVGELVDIGFAAYNFVESIINLFQVVHNSYNRPAYS

SEQ ID NO: 208 - protein, 382 aa, Artificial Sequence
  Description of Artificial Sequence: Synthetic construct
MGADDVVDSSKSFVMENFSSYHGTKPGYVDSIQKGIQKPKSGTQGNYDDDWKGFYSTDNKYDAAGYSVDNENPLSGKAGGVVKVTYPGLTKVLALKVDNAETIKKELGLSLTEPLMEQVGTEEFIKRFGDGASRVVLSLPFAEGSSSVEYINNWEQAKALSVELEINFETRGKRGQDAMYEYMAQACAGNRVRRSVGSSLSCINLDWDVIRDKTKTKIESLKEHGPIKNKMSESPNKTVSEEKAKQYLEEFHQTALEHPELSELKTVTGTNPVFAGANYAAWAVNVAQVSDSETADNLEKTTAALSILPGIGSVMGIADGAVHHNTEEIVAQSIALSSLMVAQAIPLVGELVDIGFAAYNFVESIINLFQVVHNSYNRPAYS

SEQ ID NO: 209 - protein, 382 aa, Artificial Sequence
  Description of Artificial Sequence: Synthetic construct
MGADDVVDSSKSFVMENFSSYHGTKPGYVDSIQKGIQKPKSGTQGNYDDDWKGFYSTDNKYDAAGYSVDNENPLSGKAGGVVKVTYPGLTKVLALKVDNAETIKKELGLSLTEPLMEQVGTEEFIKRFGDGASRVVLSLPFAEGSSSVEYINNWEQAKALSVELEINFETRGKRGQDAMYEYMAQACAGNRVRRSVGSSLSCINLDWDVIRDKTKTKIESLKEHGPIKNKMSESPNKTVSEEKAKQYLEEFHQTALEHPELSELKTVTGTNPVFAGANYAAWAVNVAQVTDSETADNLEKTTAALSILPGIGSVMGIADGAVHHNTEEIVAQSIALSSLMVAQAIPLVGELVDIGFAAYNFVESIINLFQVVHNSYNRPAYS

SEQ ID NO: 210 - protein, 382 aa, Artificial Sequence
  Description of Artificial Sequence: Synthetic construct
MGADDVVDSSKSFVMENFSSYHGTKPGYVDSIQKGIQKPKSGTQGNYDDDWKGFYSTDNKYDAAGYSVDNENPLSGKAGGVVKVTYPGLTKVLALKVDNAETIKKELGLSLTEPLMEQVGTEEFIKRFGDGASRVVLSLPFAEGSSSVEYINNWEQAKALSVELEINFETRGKRGQDAMYEYMAQACAGNRVRRSVGSSLSCINLDWDVIRDKTKTKIESLKEHGPIKNKMSESPNKTVSEEKAKQYLEEFHQTALEHPELSELKTVTGTNPVFAGANYAAWAVNVAQVDDSETADNLEKTTAALSILPGIGSVMGIADGAVHHNTEEIVAQSIALSSLMVAQAIPLVGELVDIGFAAYNFVESIINLFQVVHNSYNRPAYS

SEQ ID NO: 211 - protein, 382 aa, Artificial Sequence
  Description of Artificial Sequence: Synthetic construct
MGADDVVDSSKSFVMENFSSYHGTKPGYVDSIQKGIQKPKSGTQGNYDDDWKGFYSTDNKYDAAGYSVDNENPLSGKAGGVVKVTYPGLTKVLALKVDNAETIKKELGLSLTEPLMEQVGTEEFIKRFGDGASRVVLSLPFAEGSSSVEYINNWEQAKALSVELEINFETRGKRGQDAMYEYMAQACAGNRVRRSVGSSLSCINLDWDVIRDKTKTKIESLKEHGPIKNKMSESPNKTVSEEKAKQYLEEFHQTALEHPELSELKTVTGTNPVFAGANYAAWAVNVAQVIESETADNLEKTTAALSILPGIGSVMGIADGAVHHNTEEIVAQSIALSSLMVAQAIPLVGELVDIGFAAYNFVESIINLFQVVHNSYNRPAYS

SEQ ID NO: 212 - protein, 382 aa, Artificial Sequence
  Description of Artificial Sequence: Synthetic construct
MGADDVVDSSKSFVMENFSSYHGTKPGYVDSIQKGIQKPKSGTQGNYDDDWKGFYSTDNKYDAAGYSVDNENPLSGKAGGVVKVTYPGLTKVLALKVDNAETIKKELGLSLTEPLMEQVGTEEFIKRFGDGASRVVLSLPFAEGSSSVEYINNWEQAKALSVELEINFETRGKRGQDAMYEYMAQACAGNRVRRSVGSSLSCINLDWDVIRDKTKTKIESLKEHGPIKNKMSESPNKTVSEEKAKQYLEEFHQTALEHPELSELKTVTGTNPVFAGANYAAWAVNVAQVIDAETADNLEKTTAALSILPGIGSVMGIADGAVHHNTEEIVAQSIALSSLMVAQAIPLVGELVDIGFAAYNFVESIINLFQVVHNSYNRPAYS

SEQ ID NO: 213 - protein, 382 aa, Artificial Sequence
  Description of Artificial Sequence: Synthetic construct
MGADDVVDSSKSFVMENFSSYHGTKPGYVDSIQKGIQKPKSGTQGNYDDDWKGFYSTDNKYDAAGYSVDNENPLSGKAGGVVKVTYPGLTKVLALKVDNAETIKKELGLSLTEPLMEQVGTEEFIKRFGDGASRVVLSLPFAEGSSSVEYINNWEQAKALSVELEINFETRGKRGQDAMYEYMAQACAGNRVRRSVGSSLSCINLDWDVIRDKTKTKIESLKEHGPIKNKMSESPNKTVSEEKAKQYLEEFHQTALEHPELSELKTVTGTNPVFAGANYAAWAVNVAQVIDTETADNLEKTTAALSILPGIGSVMGIADGAVHHNTEEIVAQSIALSSLMVAQAIPLVGELVDIGFAAYNFVESIINLFQVVHNSYNRPAYS

SEQ ID NO: 214 - protein, 382 aa, Artificial Sequence
  Description of Artificial Sequence: Synthetic construct
MGADDVVDSSKSFVMENFSSYHGTKPGYVDSIQKGIQKPKSGTQGNYDDDWKGFYSTDNKYDAAGYSVDNENPLSGKAGGVVKVTYPGLTKVLALKVDNAETIKKELGLSLTEPLMEQVGTEEFIKRFGDGASRVVLSLPFAEGSSSVEYINNWEQAKALSVELEINFETRGKRGQDAMYEYMAQACAGNRVRRSVGSSLSCINLDWDVIRDKTKTKIESLKEHGPIKNKMSESPNKTVSEEKAKQYLEEFHQTALEHPELSELKTVTGTNPVFAGANYAAWAVNVAQVIDGETADNLEKTTAALSILPGIGSVMGIADGAVHHNTEEIVAQSIALSSLMVAQAIPLVGELVDIGFAAYNFVESIINLFQVVHNSYNRPAYS

SEQ ID NO: 215 - protein, 382 aa, Artificial Sequence
  Description of Artificial Sequence: Synthetic construct
MGADDVNDSSKSFVMENFSSYHGTKPGYNDSIQKGIQKPKSGTQGNYDDDWKGFYSTDNKYDAAGYSVDNENPLSGKAGGVVKVTYPGLTKVLALKVDNAETIKKELGLSLTEPLMEQVGTEEFIKRFGDGASRVVLSLPFAEGSSSVEYINNWEQAKALSVELEINFETRGKRGQDAMYEYMAQACAGNRVRRSVGSSLSCINLDWDVIRDKTKTKIESLKEHGPIKNKMSESPNKTVSEEKAKQYLEEFHQTALEHPELSELKTVTGTNPVFAGANYAAWAVNVAQVIDSETADNLEKTTAALSILPGIGSVMGIADGAVHHNTEEIVAQSIALSSLMVAQAIPLVGELVDIGFAAYNFVESIINLFQVVHNSYNRPAYS

SEQ ID NO: 216 - protein, 382 aa, Artificial Sequence
  Description of Artificial Sequence: Synthetic construct
MGADDVNDSSKSFVMENFSSYHGTKPGYTDSIQKGIQKPKSGTQGNYDDDWKGFYSTDNKYDAAGYSVDNENPLSGKAGGVVKVTYPGLTKVLALKVDNAETIKKELGLSLTEPLMEQVGTEEFIKRFGDGASRVVLSLPFAEGSSSVEYINNWEQAKALSVELEINFETRGKRGQDAMYEYMAQACAGNRVRRSVGSSLSCINLDWDVIRDKTKTKIESLKEHGPIKNKMSESPNKTVSEEKAKQYLEEFHQTALEHPELSELKTVTGTNPVFAGANYAAWAVNVAQVIDSETADNLEKTTAALSILPGIGSVMGIADGAVHHNTEEIVAQSIALSSLMVAQAIPLVGELVDIGFAAYNFVESIINLFQVVHNSYNRPAYS

SEQ ID NO: 217 - protein, 382 aa, Artificial Sequence
  Description of Artificial Sequence: Synthetic construct
MGADDVNDSSKSFVMENFSSYHGTKPGYDDSIQKGIQKPKSGTQGNYDDDWKGFYSTDNKYDAAGYSVDNENPLSGKAGGVVKVTYPGLTKVLALKVDNAETIKKELGLSLTEPLMEQVGTEEFIKRFGDGASRVVLSLPFAEGSSSVEYINNWEQAKALSVELEINFETRGKRGQDAMYEYMAQACAGNRVRRSVGSSLSCINLDWDVIRDKTKTKIESLKEHGPIKNKMSESPNKTVSEEKAKQYLEEFHQTALEHPELSELKTVTGTNPVFAGANYAAWAVNVAQVIDSETADNLEKTTAALSILPGIGSVMGIADGAVHHNTEEIVAQSIALSSLMVAQAIPLVGELVDIGFAAYNFVESIINLFQVVHNSYNRPAYS

SEQ ID NO: 218 - protein, 382 aa, Artificial Sequence
  Description of Artificial Sequence: Synthetic construct
MGADDVTDSSKSFVMENFSSYHGTKPGYNDSIQKGIQKPKSGTQGNYDDDWKGFYSTDNKYDAAGYSVDNENPLSGKAGGVVKVTYPGLTKVLALKVDNAETIKKELGLSLTEPLMEQVGTEEFIKRFGDGASRVVLSLPFAEGSSSVEYINNWEQAKALSVELEINFETRGKRGQDAMYEYMAQACAGNRVRRSVGSSLSCINLDWDVIRDKTKTKIESLKEHGPIKNKMSESPNKTVSEEKAKQYLEEFHQTALEHPELSELKTVTGTNPVFAGANYAAWAVNVAQVIDSETADNLEKTTAALSILPGIGSVMGIADGAVHHNTEEIVAQSIALSSLMVAQAIPLVGELVDIGFAAYNFVESIINLFQVVHNSYNRPAYS

SEQ ID NO: 219 - protein, 382 aa, Artificial Sequence
  Description of Artificial Sequence: Synthetic construct
MGADDVTDSSKSFVMENFSSYHGTKPGYTDSIQKGIQKPKSGTQGNYDDDWKGFYSTDNKYDAAGYSVDNENPLSGKAGGVVKVTYPGLTKVLALKVDNAETIKKELGLSLTEPLMEQVGTEEFIKRFGDGASRVVLSLPFAEGSSSVEYINNWEQAKALSVELEINFETRGKRGQDAMYEYMAQACAGNRVRRSVGSSLSCINLDWDVIRDKTKTKIESLKEHGPIKNKMSESPNKTVSEEKAKQYLEEFHQTALEHPELSELKTVTGTNPVFAGANYAAWAVNVAQVIDSETADNLEKTTAALSILPGIGSVMGIADGAVHHNTEEIVAQSIALSSLMVAQAIPLVGELVDIGFAAYNFVESIINLFQVVHNSYNRPAYS

SEQ ID NO: 220 - protein, 382 aa, Artificial Sequence
  Description of Artificial Sequence: Synthetic construct
MGADDVTDSSKSFVMENFSSYHGTKPGYDDSIQKGIQKPKSGTQGNYDDDWKGFYSTDNKYDAAGYSVDNENPLSGKAGGVVKVTYPGLTKVLALKVDNAETIKKELGLSLTEPLMEQVGTEEFIKRFGDGASRVVLSLPFAEGSSSVEYINNWEQAKALSVELEINFETRGKRGQDAMYEYMAQACAGNRVRRSVGSSLSCINLDWDVIRDKTKTKIESLKEHGPIKNKMSESPNKTVSEEKAKQYLEEFHQTALEHPELSELKTVTGTNPVFAGANYAAWAVNVAQVIDSETADNLEKTTAALSILPGIGSVMGIADGAVHHNTEEIVAQSIALSSLMVAQAIPLVGELVDIGFAAYNFVESIINLFQVVHNSYNRPAYS

SEQ ID NO: 221 - protein, 402 aa, Artificial Sequence
  Description of Artificial Sequence: Synthetic construct
MGADDVNDSSKSFVMENFSSYHGTKPGYNDSIQKGIQKPKSGTQGNYDDDWKGFYSTDNKYDAAGYSVDNENPLSGKAGGVVKVTYPGLTKVLALKVDNAETIKKELGLSLTEPLMEQVGTEEFIKRFGDGASRVVLSLPFAEGSSSVEYINNWEQAKALSVELEINFETRGKRGQDAMYEYMAQACAGNRVRRSVGSSLSCINLDWDVIRDKTKTKIESLKEHGPIKNKMSESPNKTVSEEKAKQYLEEFHQTALEHPELSELKTVTGTNPVFAGANYAAWAVNVAQVNDSETADNLEKTTAALSILPGIGSVMGIADGAVHHNTEEIVAQSIALSSLMVAQAIPLVGELVDIGFAAYNFVESIINLFQVVHNSYNRPAYSELADYKDDDDKGLEHHHHHH

SEQ ID NO: 222 - protein, 402 aa, Artificial Sequence
  Description of Artificial Sequence: Synthetic construct
MGADDVNDSSKSFVMENFSSYHGTKPGYNDSIQKGIQKPKSGTQGNYDDDWKGFYSTDNKYDAAGYSVDNENPLSGKAGGVVKVTYPGLTKVLALKVDNAETIKKELGLSLTEPLMEQVGTEEFIKRFGDGASRVVLSLPFAEGSSSVEYINNWEQAKALSVELEINFETRGKRGQDAMYEYMAQACAGNRVRRSVGSSLSCINLDWDVIRDKTKTKIESLKEHGPIKNKMSESPNKTVSEEKAKQYLEEFHQTALEHPELSELKTVTGTNPVFAGANYAAWAVNVAQVIDAETADNLEKTTAALSILPGIGSVMGIADGAVHHNTEEIVAQSIALSSLMVAQAIPLVGELVDIGFAAYNFVESIINLFQVVHNSYNRPAYSELADYKDDDDKGLEHHHHHH

SEQ ID NO: 223 - protein, 402 aa, Artificial Sequence
  Description of Artificial Sequence: Synthetic construct
MGADDVNDSSKSFVMENFSSYHGTKPGYNDSIQKGIQKPKSGTQGNYDDDWKGFYSTDNKYDAAGYSVDNENPLSGKAGGVVKVTYPGLTKVLALKVDNAETIKKELGLSLTEPLMEQVGTEEFIKRFGDGASRVVLSLPFAEGSSSVEYINNWEQAKALSVELEINFETRGKRGQDAMYEYMAQACAGNRVRRSVGSSLSCINLDWDVIRDKTKTKIESLKEHGPIKNKMSESPNKTVSEEKAKQYLEEFHQTALEHPELSELKTVTGTNPVFAGANYAAWAVNVAQVIDTETADNLEKTTAALSILPGIGSVMGIADGAVHHNTEEIVAQSIALSSLMVAQAIPLVGELVDIGFAAYNFVESIINLFQVVHNSYNRPAYSELADYKDDDDKGLEHHHHHH

SEQ ID NO: 224 - protein, 402 aa, Artificial Sequence
  Description of Artificial Sequence: Synthetic construct
MGADDVNDSSKSFVMENFSSYHGTKPGYTDSIQKGIQKPKSGTQGNYDDDWKGFYSTDNKYDAAGYSVDNENPLSGKAGGVVKVTYPGLTKVLALKVDNAETIKKELGLSLTEPLMEQVGTEEFIKRFGDGASRVVLSLPFAEGSSSVEYINNWEQAKALSVELEINFETRGKRGQDAMYEYMAQACAGNRVRRSVGSSLSCINLDWDVIRDKTKTKIESLKEHGPIKNKMSESPNKTVSEEKAKQYLEEFHQTALEHPELSELKTVTGTNPVFAGANYAAWAVNVAQVIDTETADNLEKTTAALSILPGIGSVMGIADGAVHHNTEEIVAQSIALSSLMVAQAIPLVGELVDIGFAAYNFVESIINLFQVVHNSYNRPAYSELADYKDDDDKGLEHHHHHH

SEQ ID NO: 225 - protein, 402 aa, Artificial Sequence
  Description of Artificial Sequence: Synthetic construct
MGADDVNDSSKSFVMENFSSYHGTKPGYTDSIQKGIQKPKSGTQGNYDDDWKGFYSTDNKYDAAGYSVDNENPLSGKAGGVVKVTYPGLTKVLALKVDNAETIKKELGLSLTEPLMEQVGTEEFIKRFGDGASRVVLSLPFAEGSSSVEYINNWEQAKALSVELEINFETRGKRGQDAMYEYMAQACAGNRVRRSVGSSLSCINLDWDVIRDKTKTKIESLKEHGPIKNKMSESPNKTVSEEKAKQYLEEFHQTALEHPELSELKTVTGTNPVFAGANYAAWAVNVAQVTDSETADNLEKTTAALSILPGIGSVMGIADGAVHHNTEEIVAQSIALSSLMVAQAIPLVGELVDIGFAAYNFVESIINLFQVVHNSYNRPAYSELADYKDDDDKGLEHHHHHH

SEQ ID NO: 226 - protein, 402 aa, Artificial Sequence
  Description of Artificial Sequence: Synthetic construct
MGADDVNDSSKSFVMENFSSYHGTKPGYTDSIQKGIQKPKSGTQGNYDDDWKGFYSTDNKYDAAGYSVDNENPLSGKAGGVVKVTYPGLTKVLALKVDNAETIKKELGLSLTEPLMEQVGTEEFIKRFGDGASRVVLSLPFAEGSSSVEYINNWEQAKALSVELEINFETRGKRGQDAMYEYMAQACAGNRVRRSVGSSLSCINLDWDVIRDKTKTKIESLKEHGPIKNKMSESPNKTVSEEKAKQYLEEFHQTALEHPELSELKTVTGTNPVFAGANYAAWAVNVAQVNDSETADNLEKTTAALSILPGIGSVMGIADGAVHHNTEEIVAQSIALSSLMVAQAIPLVGELVDIGFAAYNFVESIINLFQVVHNSYNRPAYSELADYKDDDDKGLEHHHHHH

SEQ ID NO: 227 - protein, 382 aa, Artificial Sequence
  Description of Artificial Sequence: Synthetic construct
MGADDVNDSSKSFVMENFSSYHGTKPGYTDSIQKGIQKPKSGTQGNYDDDWKGFYSTDNKYDAAGYSVDNENPLSGKAGGVVKVTYPGLTKVLALKVDNAETIKKELGLSLTEPLMEQVGTEEFIKRFGDGASRVVLSLPFAEGSSSVEYINNWEQAKALSVELEINFETRGKRGQDAMYEYMAQACAGNRVRRSVGSSLSCINLDWDVIRDKTKTKIESLKEHGPIKNKMSESPNKTVSEEKAKQYLEEFHQTALEHPELSELKTVTGTNPVFAGANYAAWAVNVAQVIDAETADNLEKTTAALSILPGIGSVMGIADGAVHHNTEEIVAQSIALSSLMVAQAIPLVGELVDIGFAAYNFVESIINLFQVVHNSYNRPAYS

SEQ ID NO: 228 - protein, 382 aa, Artificial Sequence
  Description of Artificial Sequence: Synthetic construct
MGADDVTDSSKSFVMENFSSYHGTKPGYTDSIQKGIQKPKSGTQGNYDDDWKGFYSTDNKYDAAGYSVDNENPLSGKAGGVVKVTYPGLTKVLALKVDNAETIKKELGLSLTEPLMEQVGTEEFIKRFGDGASRVVLSLPFAEGSSSVEYINNWEQAKALSVELEINFETRGKRGQDAMYEYMAQACAGNRVRRSVGSSLSCINLDWDVIRDKTKTKIESLKEHGPIKNKMSESPNKTVSEEKAKQYLEEFHQTALEHPELSELKTVTGTNPVFAGANYAAWAVNVAQVNDSETADNLEKTTAALSILPGIGSVMGIADGAVHHNTEEIVAQSIALSSLMVAQAIPLVGELVDIGFAAYNFVESIINLFQVVHNSYNRPAYS

SEQ ID NO: 229 - protein, 382 aa, Artificial Sequence
  Description of Artificial Sequence: Synthetic construct
MGADDVTDSSKSFVMENFSSYHGTKPGYTDSIQKGIQKPKSGTQGNYDDDWKGFYSTDNKYDAAGYSVDNENPLSGKAGGVVKVTYPGLTKVLALKVDNAETIKKELGLSLTEPLMEQVGTEEFIKRFGDGASRVVLSLPFAEGSSSVEYINNWEQAKALSVELEINFETRGKRGQDAMYEYMAQACAGNRVRRSVGSSLSCINLDWDVIRDKTKTKIESLKEHGPIKNKMSESPNKTVSEEKAKQYLEEFHQTALEHPELSELKTVTGTNPVFAGANYAAWAVNVAQVTDSETADNLEKTTAALSILPGIGSVMGIADGAVHHNTEEIVAQSIALSSLMVAQAIPLVGELVDIGFAAYNFVESIINLFQVVHNSYNRPAYS

SEQ ID NO: 230 - protein, 382 aa, Artificial Sequence
  Description of Artificial Sequence: Synthetic construct
MGADDVTDSSKSFVMENFSSYHGTKPGYTDSIQKGIQKPKSGTQGNYDDDWKGFYSTDNKYDAAGYSVDNENPLSGKAGGVVKVTYPGLTKVLALKVDNAETIKKELGLSLTEPLMEQVGTEEFIKRFGDGASRVVLSLPFAEGSSSVEYINNWEQAKALSVELEINFETRGKRGQDAMYEYMAQACAGNRVRRSVGSSLSCINLDWDVIRDKTKTKIESLKEHGPIKNKMSESPNKTVSEEKAKQYLEEFHQTALEHPELSELKTVTGTNPVFAGANYAAWAVNVAQVIDAETADNLEKTTAALSILPGIGSVMGIADGAVHHNTEEIVAQSIALSSLMVAQAIPLVGELVDIGFAAYNFVESIINLFQVVHNSYNRPAYS

SEQ ID NO: 231 - protein, 382 aa, Artificial Sequence
  Description of Artificial Sequence: Synthetic construct
MGADDVTDSSKSFVMENFSSYHGTKPGYTDSIQKGIQKPKSGTQGNYDDDWKGFYSTDNKYDAAGYSVDNENPLSGKAGGVVKVTYPGLTKVLALKVDNAETIKKELGLSLTEPLMEQVGTEEFIKRFGDGASRVVLSLPFAEGSSSVEYINNWEQAKALSVELEINFETRGKRGQDAMYEYMAQACAGNRVRRSVGSSLSCINLDWDVIRDKTKTKIESLKEHGPIKNKMSESPNKTVSEEKAKQYLEEFHQTALEHPELSELKTVTGTNPVFAGANYAAWAVNVAQVIDTETADNLEKTTAALSILPGIGSVMGIADGAVHHNTEEIVAQSIALSSLMVAQAIPLVGELVDIGFAAYNFVESIINLFQVVHNSYNRPAYS

SEQ ID NO: 232 - protein, 382 aa, Artificial Sequence
  Description of Artificial Sequence: Synthetic construct
MGADDVVDSSKSFVMENFSSYHGTKPGYVDSIQKGIQKPKSGTQGNYDDDWKEFYSTDNKYDAAGYSVDNENPLSGKAGGVVKVTYPGLTKVLALKVDNAETIKKELGLSLTEPLMEQVGTEEFIKRFGDGASRVVLSLPFAEGSSSVEYINNWEQAKALSVELEINFETRGKRGQDAMYEYMAQACAGNRVRRSVGSSLSCINLDWDVIRDKTKTKIESLKEHGPIKNKMSESPNKTVSEEKAKQYLEEFHQTALEHPELSELKTVTGTNPVFAGANYAAWAVNVAQVIDSETADNLEKTTAALSILPGIGSVMGIADGAVHHNTEEIVAQSIALSSLMVAQAIPLVGELVDIGFAAYNFVESIINLFQVVHNSYNRPAYS

SEQ ID NO: 233 - protein, 382 aa, Artificial Sequence; identical to SEQ ID NO: 190
  Description of Artificial Sequence: Synthetic construct

SEQ ID NO: 234 - protein, 382 aa, Artificial Sequence; identical to SEQ ID NO: 191
  Description of Artificial Sequence: Synthetic construct

SEQ ID NO: 235 - protein, 382 aa, Artificial Sequence; identical to SEQ ID NO: 192
  Description of Artificial Sequence: Synthetic construct

SEQ ID NO: 236 - protein, 382 aa, Artificial Sequence; identical to SEQ ID NO: 193
  Description of Artificial Sequence: Synthetic construct

SEQ ID NO: 237 - protein, 382 aa, Artificial Sequence
  Description of Artificial Sequence: Synthetic construct
MGADDVVDSSKSFVMENFSSYHGTKPGYVDSIQKGIQKPKSGTQGNYDDDWKGFYSTDNKYDAAGYSVDNENPLSGKAGGVVKVTYPGLTKVLALKADNAETIKKELGLSLTEPLMEQVGTEEFIKRFGDGASRVVLSLPFAEGSSSVEYINNWEQAKALSVELEINFETRGKRGQDAMYEYMAQACAGNRVRRSVGSSLSCINLDWDVIRDKTKTKIESLKEHGPIKNKMSESPNKTVSEEKAKQYLEEFHQTALEHPELSELKTVTGTNPVFAGANYAAWAVNVAQVIDSETADNLEKTTAALSILPGIGSVMGIADGAVHHNTEEIVAQSIALSSLMVAQAIPLVGELVDIGFAAYNFVESIINLFQVVHNSYNRPAYS

SEQ ID NO: 238 - protein, 382 aa, Artificial Sequence
  Description of Artificial Sequence: Synthetic construct
MGADDVVDSSKSFVMENFSSYHGTKPGYVDSIQKGIQKPKSGTQGNYDDDWKGFYSTDNKYDAAGYSVDNENPLSGKAGGVVKVTYPGLTKVLALKTDNAETIKKELGLSLTEPLMEQVGTEEFIKRFGDGASRVVLSLPFAEGSSSVEYINNWEQAKALSVELEINFETRGKRGQDAMYEYMAQACAGNRVRRSVGSSLSCINLDWDVIRDKTKTKIESLKEHGPIKNKMSESPNKTVSEEKAKQYLEEFHQTALEHPELSELKTVTGTNPVFAGANYAAWAVNVAQVIDSETADNLEKTTAALSILPGIGSVMGIADGAVHHNTEEIVAQSIALSSLMVAQAIPLVGELVDIGFAAYNFVESIINLFQVVHNSYNRPAYS

SEQ ID NO: 239 - protein, 382 aa, Artificial Sequence
  Description of Artificial Sequence: Synthetic construct
MGADDVVDSSKSFVMENFSSYHGTKPGYVDSIQKGIQKPKSGTQGNYDDDWKGFYSTDNKYDAAGYSVDNENPLSGKAGGVVKVTYPGLTKVLALKDDNAETIKKELGLSLTEPLMEQVGTEEFIKRFGDGASRVVLSLPFAEGSSSVEYINNWEQAKALSVELEINFETRGKRGQDAMYEYMAQACAGNRVRRSVGSSLSCINLDWDVIRDKTKTKIESLKEHGPIKNKMSESPNKTVSEEKAKQYLEEFHQTALEHPELSELKTVTGTNPVFAGANYAAWAVNVAQVIDSETADNLEKTTAALSILPGIGSVMGIADGAVHHNTEEIVAQSIALSSLMVAQAIPLVGELVDIGFAAYNFVESIINLFQVVHNSYNRPAYS

SEQ ID NO: 240 - protein, 382 aa, Artificial Sequence
  Description of Artificial Sequence: Synthetic construct
MGADDVVDSSKSFVMENFSSYHGTKPGYVDSIQKGIQKPKSGTQGNYDDDWKGFYSTDNKYDAAGYSVDNENPLSGKAGGVVKVTYPGLTKVLALKVDNAETIKKEAGLSLTEPLMEQVGTEEFIKRFGDGASRVVLSLPFAEGSSSVEYINNWEQAKALSVELEINFETRGKRGQDAMYEYMAQACAGNRVRRSVGSSLSCINLDWDVIRDKTKTKIESLKEHGPIKNKMSESPNKTVSEEKAKQYLEEFHQTALEHPELSELKTVTGTNPVFAGANYAAWAVNVAQVIDSETADNLEKTTAALSILPGIGSVMGIADGAVHHNTEEIVAQSIALSSLMVAQAIPLVGELVDIGFAAYNFVESIINLFQVVHNSYNRPAYS

SEQ ID NO: 241 - protein, 382 aa, Artificial Sequence
  Description of Artificial Sequence: Synthetic construct
MGADDVVDSSKSFVMENFSSYHGTKPGYVDSIQKGIQKPKSGTQGNYDDDWKGFYSTDNKYDAAGYSVDNENPLSGKAGGVVKVTYPGLTKVLALKVDNAETIKKENGLSLTEPLMEQVGTEEFIKRFGDGASRVVLSLPFAEGSSSVEYINNWEQAKALSVELEINFETRGKRGQDAMYEYMAQACAGNRVRRSVGSSLSCINLDWDVIRDKTKTKIESLKEHGPIKNKMSESPNKTVSEEKAKQYLEEFHQTALEHPELSELKTVTGTNPVFAGANYAAWAVNVAQVIDSETADNLEKTTAALSILPGIGSVMGIADGAVHHNTEEIVAQSIALSSLMVAQAIPLVGELVDIGFAAYNFVESIINLFQVVHNSYNRPAYS

SEQ ID NO: 242 - protein, 382 aa, Artificial Sequence
  Description of Artificial Sequence: Synthetic construct
MGADDVVDSSKSFVMENFSSYHGTKPGYVDSIQKGIQKPKSGTQGNYDDDWKGFYSTDNKYDAAGYSVDNENPLSGKAGGVVKVTYPGLTKVLALKVDNAETIKKELGLSLTEPLAEQVGTEEFIKRFGDGASRVVLSLPFAEGSSSVEYINNWEQAKALSVELEINFETRGKRGQDAMYEYMAQACAGNRVRRSVGSSLSCINLDWDVIRDKTKTKIESLKEHGPIKNKMSESPNKTVSEEKAKQYLEEFHQTALEHPELSELKTVTGTNPVFAGANYAAWAVNVAQVIDSETADNLEKTTAALSILPGIGSVMGIADGAVHHNTEEIVAQSIALSSLMVAQAIPLVGELVDIGFAAYNFVESIINLFQVVHNSYNRPAYS

SEQ ID NO: 243 - protein, 382 aa, Artificial Sequence
  Description of Artificial Sequence: Synthetic construct
MGADDVVDSSKSFVMENFSSYHGTKPGYVDSIQKGIQKPKSGTQGNYDDDWKGFYSTDNKYDAAGYSVDNENPLSGKAGGVVKVTYPGLTKVLALKVDNAETIKKELGLSLTEPLQEQVGTEEFIKRFGDGASRVVLSLPFAEGSSSVEYINNWEQAKALSVELEINFETRGKRGQDAMYEYMAQACAGNRVRRSVGSSLSCINLDWDVIRDKTKTKIESLKEHGPIKNKMSESPNKTVSEEKAKQYLEEFHQTALEHPELSELKTVTGTNPVFAGANYAAWAVNVAQVIDSETADNLEKTTAALSILPGIGSVMGIADGAVHHNTEEIVAQSIALSSLMVAQAIPLVGELVDIGFAAYNFVESIINLFQVVHNSYNRPAYS

SEQ ID NO: 244 - protein, 382 aa, Artificial Sequence
  Description of Artificial Sequence: Synthetic construct
MGADDVVDSSKSFVMENFSSYHGTKPGYVDSIQKGIQKPKSGTQGNYDDDWKGFYSTDNKYDAAGYSVDNENPLSGKAGGVVKVTYPGLTKVLALKVDNAETIKKELGLSLTEPLNEQVGTEEFIKRFGDGASRVVLSLPFAEGSSSVEYINNWEQAKALSVELEINFETRGKRGQDAMYEYMAQACAGNRVRRSVGSSLSCINLDWDVIRDKTKTKIESLKEHGPIKNKMSESPNKTVSEEKAKQYLEEFHQTALEHPELSELKTVTGTNPVFAGANYAAWAVNVAQVIDSETADNLEKTTAALSILPGIGSVMGIADGAVHHNTEEIVAQSIALSSLMVAQAIPLVGELVDIGFAAYNFVESIINLFQVVHNSYNRPAYS

SEQ ID NO: 245 - protein, 382 aa, Artificial Sequence
  Description of Artificial Sequence: Synthetic construct
MGADDVVDSSKSFVMENFSSYHGTKPGYVDSIQKGIQKPKSGTQGNYDDDWKGFYSTDNKYDAAGYSVDNENPLSGKAGGVVKVTYPGLTKVLALKVDNAETIKKELGLSLTEPLMEQVGTEEAIKRFGDGASRVVLSLPFAEGSSSVEYINNWEQAKALSVELEINFETRGKRGQDAMYEYMAQACAGNRVRRSVGSSLSCINLDWDVIRDKTKTKIESLKEHGPIKNKMSESPNKTVSEEKAKQYLEEFHQTALEHPELSELKTVTGTNPVFAGANYAAWAVNVAQVIDSETADNLEKTTAALSILPGIGSVMGIADGAVHHNTEEIVAQSIALSSLMVAQAIPLVGELVDIGFAAYNFVESIINLFQVVHNSYNRPAYS

SEQ ID NO: 246 - protein, 382 aa, Artificial Sequence
  Description of Artificial Sequence: Synthetic construct
MGADDVVDSSKSFVMENFSSYHGTKPGYVDSIQKGIQKPKSGTQGNYDDDWKGFYSTDNKYDAAGYSVDNENPLSGKAGGVVKVTYPGLTKVLALKVDNAETIKKELGLSLTEPLMEQVGTEEHIKRFGDGASRVVLSLPFAEGSSSVEYINNWEQAKALSVELEINFETRGKRGQDAMYEYMAQACAGNRVRRSVGSSLSCINLDWDVIRDKTKTKIESLKEHGPIKNKMSESPNKTVSEEKAKQYLEEFHQTALEHPELSELKTVTGTNPVFAGANYAAWAVNVAQVIDSETADNLEKTTAALSILPGIGSVMGIADGAVHHNTEEIVAQSIALSSLMVAQAIPLVGELVDIGFAAYNFVESIINLFQVVHNSYNRPAYS

SEQ ID NO: 247 - protein, 382 aa, Artificial Sequence
  Description of Artificial Sequence: Synthetic construct
MGADDVVDSSKSFVMENFSSYHGTKPGYVDSIQKGIQKPKSGTQGNYDDDWKGFYSTDNKYDAAGYSVDNENPLSGKAGGVVKVTYPGLTKVLALKVDNAETIKKELGLSLTEPLMEQVGTEEKIKRFGDGASRVVLSLPFAEGSSSVEYINNWEQAKALSVELEINFETRGKRGQDAMYEYMAQACAGNRVRRSVGSSLSCINLDWDVIRDKTKTKIESLKEHGPIKNKMSESPNKTVSEEKAKQYLEEFHQTALEHPELSELKTVTGTNPVFAGANYAAWAVNVAQVIDSETADNLEKTTAALSILPGIGSVMGIADGAVHHNTEEIVAQSIALSSLMVAQAIPLVGELVDIGFAAYNFVESIINLFQVVHNSYNRPAYS

SEQ ID NO: 248 - protein, 382 aa, Artificial Sequence
  Description of Artificial Sequence: Synthetic construct
MGADDVVDSSKSFVMENFSSYHGTKPGYVDSIQKGIQKPKSGTQGNYDDDWKGFYSTDNKYDAAGYSVDNENPLSGKAGGVVKVTYPGLTKVLALKVDNAETIKKELGLSLTEPLMEQVGTEEFIKRFGDGASRVVLSLPFAEGSSSAEYINNWEQAKALSVELEINFETRGKRGQDAMYEYMAQACAGNRVRRSVGSSLSCINLDWDVIRDKTKTKIESLKEHGPIKNKMSESPNKTVSEEKAKQYLEEFHQTALEHPELSELKTVTGTNPVFAGANYAAWAVNVAQVIDSETADNLEKTTAALSILPGIGSVMGIADGAVHHNTEEIVAQSIALSSLMVAQAIPLVGELVDIGFAAYNFVESIINLFQVVHNSYNRPAYS

SEQ ID NO: 249 - protein, 382 aa, Artificial Sequence
  Description of Artificial Sequence: Synthetic construct
MGADDVVDSSKSFVMENFSSYHGTKPGYVDSIQKGIQKPKSGTQGNYDDDWKGFYSTDNKYDAAGYSVDNENPLSGKAGGVVKVTYPGLTKVLALKVDNAETIKKELGLSLTEPLMEQVGTEEFIKRFGDGASRVVLSLPFAEGSSSTEYINNWEQAKALSVELEINFETRGKRGQDAMYEYMAQACAGNRVRRSVGSSLSCINLDWDVIRDKTKTKIESLKEHGPIKNKMSESPNKTVSEEKAKQYLEEFHQTALEHPELSELKTVTGTNPVFAGANYAAWAVNVAQVIDSETADNLEKTTAALSILPGIGSVMGIADGAVHHNTEEIVAQSIALSSLMVAQAIPLVGELVDIGFAAYNFVESIINLFQVVHNSYNRPAYS

SEQ ID NO: 250 - protein, 382 aa, Artificial Sequence
  Description of Artificial Sequence: Synthetic construct
MGADDVVDSSKSFVMENFSSYHGTKPGYVDSIQKGIQKPKSGTQGNYDDDWKGFYSTDNKYDAAGYSVDNENPLSGKAGGVVKVTYPGLTKVLALKVDNAETIKKELGLSLTEPLMEQVGTEEFIKRFGDGASRVVLSLPFAEGSSSVEYINNWEQAKALSVELEINFETRGKRGQDAMYEYMAQACAGNRVRRSVGSSLSCINLDWDVIRDKTKTKIESLKEHGPIKNKMSESPNKTVSEEKAKQYLEEFHQTALEHPELSELKTVTGTNPVFAGANYAAWAVNVAQVIDSETADNAEKTTAALSILPGIGSVMGIADGAVHHNTEEIVAQSIALSSLMVAQAIPLVGELVDIGFAAYNFVESIINLFQVVHNSYNRPAYS

SEQ ID NO: 251 - protein, 382 aa, Artificial Sequence
  Description of Artificial Sequence: Synthetic construct
MGADDVVDSSKSFVMENFSSYHGTKPGYVDSIQKGIQKPKSGTQGNYDDDWKGFYSTDNKYDAAGYSVDNENPLSGKAGGVVKVTYPGLTKVLALKVDNAETIKKELGLSLTEPLMEQVGTEEFIKRFGDGASRVVLSLPFAEGSSSVEYINNWEQAKALSVELEINFETRGKRGQDAMYEYMAQACAGNRVRRSVGSSLSCINLDWDVIRDKTKTKIESLKEHGPIKNKMSESPNKTVSEEKAKQYLEEFHQTALEHPELSELKTVTGTNPVFAGANYAAWAVNVAQVIDSETADNNEKTTAALSILPGIGSVMGIADGAVHHNTEEIVAQSIALSSLMVAQAIPLVGELVDIGFAAYNFVESIINLFQVVHNSYNRPAYS

SEQ ID NO: 252 - protein, 382 aa, Artificial Sequence
  Description of Artificial Sequence: Synthetic construct
MGADDVTDSSKSFVMENFSSYHGTKPGYVDSIQKGIQKPKSGTQGNYDDDWKGFYSTDNKYDAAGYSVDNENPLSGKAGGVVKVTYPGLTKVLALKVDNAETIKKELGLSLTEPLMEQVGTEEHIKRFGDGASRVVLSLPFAEGSSSVEYINNWEQAKALSVELEINFETRGKRGQDAMYEYMAQACAGNRVRRSVGSSLSCINLDWDVIRDKTKTKIESLKEHGPIKNKMSESPNKTVSEEKAKQYLEEFHQTALEHPELSELKTVTGTNPVFAGANYAAWAVNVAQVIDSETADNLEKTTAALSILPGIGSVMGIADGAVHHNTEEIVAQSIALSSLMVAQAIPLVGELVDIGFAAYNFVESIINLFQVVHNSYNRPAYS

SEQ ID NO: 253 - protein, 382 aa, Artificial Sequence
  Description of Artificial Sequence: Synthetic construct
MGADDVNDSSKSFVMENFSSYHGTKPGYVDSIQKGIQKPKSGTQGNYDDDWKGFYSTDNKYDAAGYSVDNENPLSGKAGGVVKVTYPGLTKVLALKVDNAETIKKELGLSLTEPLMEQVGTEEHIKRFGDGASRVVLSLPFAEGSSSVEYINNWEQAKALSVELEINFETRGKRGQDAMYEYMAQACAGNRVRRSVGSSLSCINLDWDVIRDKTKTKIESLKEHGPIKNKMSESPNKTVSEEKAKQYLEEFHQTALEHPELSELKTVTGTNPVFAGANYAAWAVNVAQVIDSETADNLEKTTAALSILPGIGSVMGIADGAVHHNTEEIVAQSIALSSLMVAQAIPLVGELVDIGFAAYNFVESIINLFQVVHNSYNRPAYS

SEQ ID NO: 254 - protein, 382 aa, Artificial Sequence
  Description of Artificial Sequence: Synthetic construct
MGADDVDDSSKSFVMENFSSYHGTKPGYVDSIQKGIQKPKSGTQGNYDDDWKGFYSTDNKYDAAGYSVDNENPLSGKAGGVVKVTYPGLTKVLALKVDNAETIKKELGLSLTEPLMEQVGTEEHIKRFGDGASRVVLSLPFAEGSSSVEYINNWEQAKALSVELEINFETRGKRGQDAMYEYMAQACAGNRVRRSVGSSLSCINLDWDVIRDKTKTKIESLKEHGPIKNKMSESPNKTVSEEKAKQYLEEFHQTALEHPELSELKTVTGTNPVFAGANYAAWAVNVAQVIDSETADNLEKTTAALSILPGIGSVMGIADGAVHHNTEEIVAQSIALSSLMVAQAIPLVGELVDIGFAAYNFVESIINLFQVVHNSYNRPAYS

SEQ ID NO: 255 - protein, 382 aa, Artificial Sequence
  Description of Artificial Sequence: Synthetic construct
MGADDVTDSSKSFVMENFSSYHGTKPGYVDSIQKGIQKPKSGTQGNYDDDWKGFYSTDNKYDAAGYSVDNENPLSGKAGGVVKVTYPGLTKVLALKVDNAETIKKEAGLSLTEPLMEQVGTEEHIKRFGDGASRVVLSLPFAEGSSSVEYINNWEQAKALSVELEINFETRGKRGQDAMYEYMAQACAGNRVRRSVGSSLSCINLDWDVIRDKTKTKIESLKEHGPIKNKMSESPNKTVSEEKAKQYLEEFHQTALEHPELSELKTVTGTNPVFAGANYAAWAVNVAQVIDSETADNLEKTTAALSILPGIGSVMGIADGAVHHNTEEIVAQSIALSSLMVAQAIPLVGELVDIGFAAYNFVESIINLFQVVHNSYNRPAYS

SEQ ID NO: 256 - protein, 382 aa, Artificial Sequence
  Description of Artificial Sequence: Synthetic construct
MGADDVNDSSKSFVMENFSSYHGTKPGYVDSIQKGIQKPKSGTQGNYDDDWKGFYSTDNKYDAAGYSVDNENPLSGKAGGVVKVTYPGLTKVLALKVDNAETIKKEAGLSLTEPLMEQVGTEEHIKRFGDGASRVVLSLPFAEGSSSVEYINNWEQAKALSVELEINFETRGKRGQDAMYEYMAQACAGNRVRRSVGSSLSCINLDWDVIRDKTKTKIESLKEHGPIKNKMSESPNKTVSEEKAKQYLEEFHQTALEHPELSELKTVTGTNPVFAGANYAAWAVNVAQVIDSETADNLEKTTAALSILPGIGSVMGIADGAVHHNTEEIVAQSIALSSLMVAQAIPLVGELVDIGFAAYNFVESIINLFQVVHNSYNRPAYS

SEQ ID NO: 257 - protein, 382 aa, Artificial Sequence
  Description of Artificial Sequence: Synthetic construct
MGADDVDDSSKSFVMENFSSYHGTKPGYVDSIQKGIQKPKSGTQGNYDDDWKGFYSTDNKYDAAGYSVDNENPLSGKAGGVVKVTYPGLTKVLALKVDNAETIKKEAGLSLTEPLMEQVGTEEHIKRFGDGASRVVLSLPFAEGSSSVEYINNWEQAKALSVELEINFETRGKRGQDAMYEYMAQACAGNRVRRSVGSSLSCINLDWDVIRDKTKTKIESLKEHGPIKNKMSESPNKTVSEEKAKQYLEEFHQTALEHPELSELKTVTGTNPVFAGANYAAWAVNVAQVIDSETADNLEKTTAALSILPGIGSVMGIADGAVHHNTEEIVAQSIALSSLMVAQAIPLVGELVDIGFAAYNFVESIINLFQVVHNSYNRPAYS

SEQ ID NO: 258 - protein, 382 aa, Artificial Sequence
  Description of Artificial Sequence: Synthetic construct
MGADDVTDSSKSFVMENFSSYHGTKPGYVDSIQKGIQKPKSGTQGNYDDDWKGFYSTDNKYDAAGYSVDNENPLSGKAGGVVKVTYPGLTKVLALKVDNAETIKKENGLSLTEPLMEQVGTEEHIKRFGDGASRVVLSLPFAEGSSSVEYINNWEQAKALSVELEINFETRGKRGQDAMYEYMAQACAGNRVRRSVGSSLSCINLDWDVIRDKTKTKIESLKEHGPIKNKMSESPNKTVSEEKAKQYLEEFHQTALEHPELSELKTVTGTNPVFAGANYAAWAVNVAQVIDSETADNLEKTTAALSILPGIGSVMGIADGAVHHNTEEIVAQSIALSSLMVAQAIPLVGELVDIGFAAYNFVESIINLFQVVHNSYNRPAYS

SEQ ID NO: 259 - protein, 382 aa, Artificial Sequence
  Description of Artificial Sequence: Synthetic construct
MGADDVNDSSKSFVMENFSSYHGTKPGYVDSIQKGIQKPKSGTQGNYDDDWKGFYSTDNKYDAAGYSVDNENPLSGKAGGVVKVTYPGLTKVLALKVDNAETIKKENGLSLTEPLMEQVGTEEHIKRFGDGASRVVLSLPFAEGSSSVEYINNWEQAKALSVELEINFETRGKRGQDAMYEYMAQACAGNRVRRSVGSSLSCINLDWDVIRDKTKTKIESLKEHGPIKNKMSESPNKTVSEEKAKQYLEEFHQTALEHPELSELKTVTGTNPVFAGANYAAWAVNVAQVIDSETADNLEKTTAALSILPGIGSVMGIADGAVHHNTEEIVAQSIALSSLMVAQAIPLVGELVDIGFAAYNFVESIINLFQVVHNSYNRPAYS

SEQ ID NO: 260 - protein, 382 aa, Artificial Sequence
  Description of Artificial Sequence: Synthetic construct
MGADDVDDSSKSFVMENFSSYHGTKPGYVDSIQKGIQKPKSGTQGNYDDDWKGFYSTDNKYDAAGYSVDNENPLSGKAGGVVKVTYPGLTKVLALKVDNAETIKKENGLSLTEPLMEQVGTEEHIKRFGDGASRVVLSLPFAEGSSSVEYINNWEQAKALSVELEINFETRGKRGQDAMYEYMAQACAGNRVRRSVGSSLSCINLDWDVIRDKTKTKIESLKEHGPIKNKMSESPNKTVSEEKAKQYLEEFHQTALEHPELSELKTVTGTNPVFAGANYAAWAVNVAQVIDSETADNLEKTTAALSILPGIGSVMGIADGAVHHNTEEIVAQSIALSSLMVAQAIPLVGELVDIGFAAYNFVESIINLFQVVHNSYNRPAYS

SEQ ID NO: 261 - protein, 382 aa, Artificial Sequence
  Description of Artificial Sequence: Synthetic construct
MGADDVTDSSKSFVMENFSSYHGTKPGYVDSIQKGIQKPKSGTQGNYDDDWKGFYSTDNKYDAAGYSVDNENPLSGKAGGVVKVTYPGLTKVLALKADNAETIKKENGLSLTEPLMEQVGTEEHIKRFGDGASRVVLSLPFAEGSSSVEYINNWEQAKALSVELEINFETRGKRGQDAMYEYMAQACAGNRVRRSVGSSLSCINLDWDVIRDKTKTKIESLKEHGPIKNKMSESPNKTVSEEKAKQYLEEFHQTALEHPELSELKTVTGTNPVFAGANYAAWAVNVAQVIDSETADNLEKTTAALSILPGIGSVMGIADGAVHHNTEEIVAQSIALSSLMVAQAIPLVGELVDIGFAAYNFVESIINLFQVVHNSYNRPAYS

SEQ ID NO: 262 - protein, 382 aa, Artificial Sequence
  Description of Artificial Sequence: Synthetic construct
MGADDVNDSSKSFVMENFSSYHGTKPGYVDSIQKGIQKPKSGTQGNYDDDWKGFYSTDNKYDAAGYSVDNENPLSGKAGGVVKVTYPGLTKVLALKADNAETIKKENGLSLTEPLMEQVGTEEHIKRFGDGASRVVLSLPFAEGSSSVEYINNWEQAKALSVELEINFETRGKRGQDAMYEYMAQACAGNRVRRSVGSSLSCINLDWDVIRDKTKTKIESLKEHGPIKNKMSESPNKTVSEEKAKQYLEEFHQTALEHPELSELKTVTGTNPVFAGANYAAWAVNVAQVIDSETADNLEKTTAALSILPGIGSVMGIADGAVHHNTEEIVAQSIALSSLMVAQAIPLVGELVDIGFAAYNFVESIINLFQVVHNSYNRPAYS

SEQ ID NO: 263 - protein, 382 aa, Artificial Sequence
  Description of Artificial Sequence: Synthetic construct
MGADDVDDSSKSFVMENFSSYHGTKPGYVDSIQKGIQKPKSGTQGNYDDDWKGFYSTDNKYDAAGYSVDNENPLSGKAGGVVKVTYPGLTKVLALKADNAETIKKENGLSLTEPLMEQVGTEEHIKRFGDGASRVVLSLPFAEGSSSVEYINNWEQAKALSVELEINFETRGKRGQDAMYEYMAQACAGNRVRRSVGSSLSCINLDWDVIRDKTKTKIESLKEHGPIKNKMSESPNKTVSEEKAKQYLEEFHQTALEHPELSELKTVTGTNPVFAGANYAAWAVNVAQVIDSETADNLEKTTAALSILPGIGSVMGIADGAVHHNTEEIVAQSIALSSLMVAQAIPLVGELVDIGFAAYNFVESIINLFQVVHNSYNRPAYS

SEQ ID NO: 264 - protein, 382 aa, Artificial Sequence
  Description of Artificial Sequence: Synthetic construct
MGADDVTDSSKSFVMENFSSYHGTKPGYVDSIQKGIQKPKSGTQGNYDDDWKGFYSTDNKYDAAGYSVDNENPLSGKAGGVVKVTYPGLTKVLALKDDNAETIKKENGLSLTEPLMEQVGTEEHIKRFGDGASRVVLSLPFAEGSSSVEYINNWEQAKALSVELEINFETRGKRGQDAMYEYMAQACAGNRVRRSVGSSLSCINLDWDVIRDKTKTKIESLKEHGPIKNKMSESPNKTVSEEKAKQYLEEFHQTALEHPELSELKTVTGTNPVFAGANYAAWAVNVAQVIDSETADNLEKTTAALSILPGIGSVMGIADGAVHHNTEEIVAQSIALSSLMVAQAIPLVGELVDIGFAAYNFVESIINLFQVVHNSYNRPAYS

SEQ ID NO: 265 - protein, 382 aa, Artificial Sequence
  Description of Artificial Sequence: Synthetic construct
MGADDVNDSSKSFVMENFSSYHGTKPGYVDSIQKGIQKPKSGTQGNYDDDWKGFYSTDNKYDAAGYSVDNENPLSGKAGGVVKVTYPGLTKVLALKDDNAETIKKENGLSLTEPLMEQVGTEEHIKRFGDGASRVVLSLPFAEGSSSVEYINNWEQAKALSVELEINFETRGKRGQDAMYEYMAQACAGNRVRRSVGSSLSCINLDWDVIRDKTKTKIESLKEHGPIKNKMSESPNKTVSEEKAKQYLEEFHQTALEHPELSELKTVTGTNPVFAGANYAAWAVNVAQVIDSETADNLEKTTAALSILPGIGSVMGIADGAVHHNTEEIVAQSIALSSLMVAQAIPLVGELVDIGFAAYNFVESIINLFQVVHNSYNRPAYS

SEQ ID NO: 266 - protein, 382 aa, Artificial Sequence
  Description of Artificial Sequence: Synthetic construct
MGADDVDDSSKSFVMENFSSYHGTKPGYVDSIQKGIQKPKSGTQGNYDDDWKGFYSTDNKYDAAGYSVDNENPLSGKAGGVVKVTYPGLTKVLALKDDNAETIKKENGLSLTEPLMEQVGTEEHIKRFGDGASRVVLSLPFAEGSSSVEYINNWEQAKALSVELEINFETRGKRGQDAMYEYMAQACAGNRVRRSVGSSLSCINLDWDVIRDKTKTKIESLKEHGPIKNKMSESPNKTVSEEKAKQYLEEFHQTALEHPELSELKTVTGTNPVFAGANYAAWAVNVAQVIDSETADNLEKTTAALSILPGIGSVMGIADGAVHHNTEEIVAQSIALSSLMVAQAIPLVGELVDIGFAAYNFVESIINLFQVVHNSYNRPAYS

SEQ ID NO: 267 - protein, 382 aa, Artificial Sequence
  Description of Artificial Sequence: Synthetic construct
MGADDVTDSSKSFVMENFSSYHGTKPGYVDSIQKGIQKPKSGTQGNYDDDWKGFYSTDNKYDAAGYSVDNENPLSGKAGGVVKVTYPGLTKVLALKTDNAETIKKENGLSLTEPLMEQVGTEEHIKRFGDGASRVVLSLPFAEGSSSVEYINNWEQAKALSVELEINFETRGKRGQDAMYEYMAQACAGNRVRRSVGSSLSCINLDWDVIRDKTKTKIESLKEHGPIKNKMSESPNKTVSEEKAKQYLEEFHQTALEHPELSELKTVTGTNPVFAGANYAAWAVNVAQVIDSETADNLEKTTAALSILPGIGSVMGIADGAVHHNTEEIVAQSIALSSLMVAQAIPLVGELVDIGFAAYNFVESIINLFQVVHNSYNRPAYS

SEQ ID NO: 268 - protein, 382 aa, Artificial Sequence
  Description of Artificial Sequence: Synthetic construct
MGADDVNDSSKSFVMENFSSYHGTKPGYVDSIQKGIQKPKSGTQGNYDDDWKGFYSTDNKYDAAGYSVDNENPLSGKAGGVVKVTYPGLTKVLALKTDNAETIKKENGLSLTEPLMEQVGTEEHIKRFGDGASRVVLSLPFAEGSSSVEYINNWEQAKALSVELEINFETRGKRGQDAMYEYMAQACAGNRVRRSVGSSLSCINLDWDVIRDKTKTKIESLKEHGPIKNKMSESPNKTVSEEKAKQYLEEFHQTALEHPELSELKTVTGTNPVFAGANYAAWAVNVAQVIDSETADNLEKTTAALSILPGIGSVMGIADGAVHHNTEEIVAQSIALSSLMVAQAIPLVGELVDIGFAAYNFVESIINLFQVVHNSYNRPAYS

SEQ ID NO: 269 - protein, 382 aa, Artificial Sequence
  Description of Artificial Sequence: Synthetic construct
MGADDVDDSSKSFVMENFSSYHGTKPGYVDSIQKGIQKPKSGTQGNYDDDWKGFYSTDNKYDAAGYSVDNENPLSGKAGGVVKVTYPGLTKVLALKTDNAETIKKENGLSLTEPLMEQVGTEEHIKRFGDGASRVVLSLPFAEGSSSVEYINNWEQAKALSVELEINFETRGKRGQDAMYEYMAQACAGNRVRRSVGSSLSCINLDWDVIRDKTKTKIESLKEHGPIKNKMSESPNKTVSEEKAKQYLEEFHQTALEHPELSELKTVTGTNPVFAGANYAAWAVNVAQVIDSETADNLEKTTAALSILPGIGSVMGIADGAVHHNTEEIVAQSIALSSLMVAQAIPLVGELVDIGFAAYNFVESIINLFQVVHNSYNRPAYS

SEQ ID NO: 270 - protein, 382 aa, Artificial Sequence
  Description of Artificial Sequence: Synthetic construct
MGADDVNDSSKSFVMENFSSYHGTKPGYNDSIQKGIQKPKSGTQGNYDDDWKGFYSTDNKYDAAGYSVDNENPLSGKAGGVVKVTYPGLTKVLALKVDNAETIKKELGLSLTEPLMEQVGTEEHIKRFGDGASRVVLSLPFAEGSSSVEYINNWEQAKALSVELEINFETRGKRGQDAMYEYMAQACAGNRVRRSVGSSLSCINLDWDVIRDKTKTKIESLKEHGPIKNKMSESPNKTVSEEKAKQYLEEFHQTALEHPELSELKTVTGTNPVFAGANYAAWAVNVAQVNDSETADNLEKTTAALSILPGIGSVMGIADGAVHHNTEEIVAQSIALSSLMVAQAIPLVGELVDIGFAAYNFVESIINLFQVVHNSYNRPAYS

SEQ ID NO: 271 - protein, 382 aa, Artificial Sequence
  Description of Artificial Sequence: Synthetic construct
MGADDVNDSSKSFVMENFSSYHGTKPGYNDSIQKGIQKPKSGTQGNYDDDWKGFYSTDNKYDAAGYSVDNENPLSGKAGGVVKVTYPGLTKVLALKVDNAETIKKELGLSLTEPLMEQVGTEEHIKRFGDGASRVVLSLPFAEGSSSVEYINNWEQAKALSVELEINFETRGKRGQDAMYEYMAQACAGNRVRRSVGSSLSCINLDWDVIRDKTKTKIESLKEHGPIKNKMSESPNKTVSEEKAKQYLEEFHQTALEHPELSELKTVTGTNPVFAGANYAAWAVNVAQVIDAETADNLEKTTAALSILPGIGSVMGIADGAVHHNTEEIVAQSIALSSLMVAQAIPLVGELVDIGFAAYNFVESIINLFQVVHNSYNRPAYS

SEQ ID NO: 272 - protein, 382 aa, Artificial Sequence
  Description of Artificial Sequence: Synthetic construct
MGADDVNDSSKSFVMENFSSYHGTKPGYNDSIQKGIQKPKSGTQGNYDDDWKGFYSTDNKYDAAGYSVDNENPLSGKAGGVVKVTYPGLTKVLALKVDNAETIKKELGLSLTEPLMEQVGTEEHIKRFGDGASRVVLSLPFAEGSSSVEYINNWEQAKALSVELEINFETRGKRGQDAMYEYMAQACAGNRVRRSVGSSLSCINLDWDVIRDKTKTKIESLKEHGPIKNKMSESPNKTVSEEKAKQYLEEFHQTALEHPELSELKTVTGTNPVFAGANYAAWAVNVAQVIDTETADNLEKTTAALSILPGIGSVMGIADGAVHHNTEEIVAQSIALSSLMVAQAIPLVGELVDIGFAAYNFVESIINLFQVVHNSYNRPAYS

SEQ ID NO: 273 - protein, 382 aa, Artificial Sequence
  Description of Artificial Sequence: Synthetic construct
MGADDVNDSSKSFVMENFSSYHGTKPGYTDSIQKGIQKPKSGTQGNYDDDWKGFYSTDNKYDAAGYSVDNENPLSGKAGGVVKVTYPGLTKVLALKVDNAETIKKELGLSLTEPLMEQVGTEEHIKRFGDGASRVVLSLPFAEGSSSVEYINNWEQAKALSVELEINFETRGKRGQDAMYEYMAQACAGNRVRRSVGSSLSCINLDWDVIRDKTKTKIESLKEHGPIKNKMSESPNKTVSEEKAKQYLEEFHQTALEHPELSELKTVTGTNPVFAGANYAAWAVNVAQVIDAETADNLEKTTAALSILPGIGSVMGIADGAVHHNTEEIVAQSIALSSLMVAQAIPLVGELVDIGFAAYNFVESIINLFQVVHNSYNRPAYS

SEQ ID NO: 274 - protein, 382 aa, Artificial Sequence
  Description of Artificial Sequence: Synthetic construct
MGADDVNDSSKSFVMENFSSYHGTKPGYTDSIQKGIQKPKSGTQGNYDDDWKGFYSTDNKYDAAGYSVDNENPLSGKAGGVVKVTYPGLTKVLALKVDNAETIKKELGLSLTEPLMEQVGTEEHIKRFGDGASRVVLSLPFAEGSSSVEYINNWEQAKALSVELEINFETRGKRGQDAMYEYMAQACAGNRVRRSVGSSLSCINLDWDVIRDKTKTKIESLKEHGPIKNKMSESPNKTVSEEKAKQYLEEFHQTALEHPELSELKTVTGTNPVFAGANYAAWAVNVAQVTDSETADNLEKTTAALSILPGIGSVMGIADGAVHHNTEEIVAQSIALSSLMVAQAIPLVGELVDIGFAAYNFVESIINLFQVVHNSYNRPAYS

SEQ ID NO: 275 - protein, 382 aa, Artificial Sequence
  Description of Artificial Sequence: Synthetic construct
MGADDVNDSSKSFVMENFSSYHGTKPGYTDSIQKGIQKPKSGTQGNYDDDWKGFYSTDNKYDAAGYSVDNENPLSGKAGGVVKVTYPGLTKVLALKVDNAETIKKELGLSLTEPLMEQVGTEEHIKRFGDGASRVVLSLPFAEGSSSVEYINNWEQAKALSVELEINFETRGKRGQDAMYEYMAQACAGNRVRRSVGSSLSCINLDWDVIRDKTKTKIESLKEHGPIKNKMSESPNKTVSEEKAKQYLEEFHQTALEHPELSELKTVTGTNPVFAGANYAAWAVNVAQVNDSETADNLEKTTAALSILPGIGSVMGIADGAVHHNTEEIVAQSIALSSLMVAQAIPLVGELVDIGFAAYNFVESIINLFQVVHNSYNRPAYS

SEQ ID NO: 276 - protein, 382 aa, Artificial Sequence
  Description of Artificial Sequence: Synthetic construct
MGADDVNDSSKSFVMENFSSYHGTKPGYNDSIQKGIQKPKSGTQGNYDDDWKGFYSTDNKYDAAGYSVDNENPLSGKAGGVVKVTYPGLTKVLALKVDNAETIKKELGLSLTEPLMEQVGTEEFIKRFGDGASRVVLSLPFAEGSSSVEYINNWEQAKALSVELEINFETRGKRGQDAMYEYMAQACAGNRVRRSVGSSLSCINLDWDVIRDKTKTKIESLKEHGPIKNKMSESPNKTVSEEKAKQYLEEFHQTALEHPELSELKTVTGTNPVFAGANYAAWAVNVAQVTDSETADNLEKTTAALSILPGIGSVMGIADGAVHHNTEEIVAQSIALSSLMVAQAIPLVGELVDIGFAAYNFVESIINLFQVVHNSYNRPAYS
